(19) United States
(12) Patent Application Publication
(10) Pub. No.: US 2016/0152995 A1
(43) Pub. Date: Jun. 2, 2016

(54) METHODS AND COMPOSITIONS TO IMPROVE THE SPREAD OF CHEMICAL SIGNALS IN PLANTS

(71) Applicants: PIONEER HI-BRED INTERNATIONAL, INC., Johnston, IA (US); E.I. DU PONT DE NEMOURS AND COMPANY, Wilmington, DE (US)

(72) Inventors: Kevin E. McBride, Davis, CA (US); Brian McGonigle, Wilmington, DE (US); Narendra S. Yadav, Wilmington, DE (US)

(21) Appl. No.: 14/775,531

(22) PCT Filed: Mar. 11, 2014
(86) PCT No.: PCT/US14/23451

§ 371 Date: Sep. 11, 2015

Related U.S. Application Data
(60) Provisional application No. 61/776,296, filed on Mar. 11, 2013.

(51) Int. Cl. C12N 15/82

(52) U.S. Cl. CPC C12N 15/8238; C12N 15/8218

(57) ABSTRACT

Compositions and methods are provided which employ a chemical-gene switch which may comprise at least three components. The first component comprises a polynucleotide encoding a chemically-regulated transcriptional repressor; the second component comprises a repressible promoter operably linked to a polynucleotide of interest, and the third component comprises a gene silencing construct operably linked to a second repressible promoter, wherein the gene silencing construct encodes a silencing element that decreases the level of mRNA encoding the chemically-regulated transcriptional repressor. Expression of the polynucleotide of interest and the silencing construct is controlled by providing the appropriate chemical ligand. Transient induction from the chemical ligand leads to the production of the silencing element, and the destruction of the mRNA encoding the chemically-regulated transcriptional repressor.

### REFERENCE TO SEQUENCE LISTING

[0001] The Sequence Listing submitted 11 Mar. 2014, as a text file named 36446_0068P1_Seq_List.txt, created on 5 Mar. 2014, and having a size of 2,258,550 bytes is hereby incorporated by reference pursuant to 37 C.F.R. §1.52(e)(5).

### FIELD OF THE INVENTION

[0002] The invention relates to the field of molecular biology, more particularly to the regulation of gene expression.

### BACKGROUND

[0003] The tetracycline operon system, comprising repressor and operator elements, was originally isolated from bacteria. The operon system is tightly controlled by the presence of tetracycline, and self-regulates the level of expression of tetA and tetR genes. The product of tetA removes tetracycline from the cell. The product of tetR is the repressor protein that binds to the operator elements with a K_{d} of about 10 pM in the absence of tetracycline, thereby blocking expression or tetA and tetR.

[0004] This system has been modified to control expression of other polynucleotides of interest, and/or for use in other organisms, mainly for use in animal systems. Tet operon based systems have had limited use in plants, at least partially due to problems with the inducers which are typically antibiotic compounds, and sensitive to light. Moreover, other chemical-gene switches employed in plants require the chemical ligand to contact and penetrate the cell for the switch to be activated. This limits the extent to which a chemical-gene switch can be activated in tissues or organisms not easily contacted with the chemical ligand.

[0005] There is a need to regulate expression of sequences of interest in organisms. Chemical-gene switch compositions and methods to regulate expression in response to compounds, such as sulfonylurea compounds, are provided.

### SUMMARY

[0006] Compositions and methods are provided which employ a chemical-gene switch. The chemical-gene switch disclosed herein comprises at least three components. The first component comprises a polynucleotide encoding a chemically-regulated transcriptional repressor; the second component comprises a repressible promoter operably linked to a polynucleotide of interest, and the third component comprises a gene silencing construct operably linked to a second repressible promoter, wherein the gene silencing construct encodes a silencing element that decreases the level of the chemically-regulated transcriptional repressor. Expression of the polynucleotide of interest and the silencing construct is controlled by providing the appropriate chemical ligand. Transient induction from the chemical ligand leads to the production of the silencing element, and the destruction of the mRNA encoding the chemically-regulated transcriptional repressor. The presence of the silencing element maintains a state of de-repression. Since, in some embodiments, the silencing elements are cell non-autonomous, the state of de-repression becomes more distributed throughout the plant beyond where the chemical ligand reaches.

### BRIEF DESCRIPTION OF DRAWINGS

[0007] FIG. 1 provides a non-limiting example of a sulfonylurea chemical-gene switch.

[0008] FIG. 2 provides a non-limiting example for modifying a sulfonylurea chemical-gene switch with siRNA.

[0009] FIG. 3 provides a non-limiting schematic for optimizing the dosage of repressor transcript for siRNA efficacy thru repressor auto-regulation.

[0010] FIG. 4 provides a non-limiting example of targeting the repressor EsR (L13-23) transcript.

[0011] FIG. 5 demonstrates induction in test and control transgenic tobacco plants.

[0012] FIG. 6 shows extended and more thorough Ethametsulfuron induction in tobacco seedlings.

[0013] FIG. 7 demonstrates long term derepression in tobacco plants induced with Ethametsulfuron during germination.

[0014] FIG. 8 provides a summary of source diversity, library design, hit diversity, and population bias for several generations of sulfonylurea repressor shuffling libraries. A dash (“-”) indicates no amino acid diversity introduced at that position in that library. An X indicates that the library oligonucleotides were designed to introduce complete amino acid diversity (any of 20 amino acids) at that position in that library. Residues in bold indicate bias during selection with larger font size indicating a greater degree of bias in the selected population. Residues in parentheses indicate selected random mutations. The phylogenetic diversity pool was derived from a broad family of 34 tetracycline repressor sequences.

[0015] FIG. 9 provides a summary of source diversity, library design, hit diversity, and population bias for several generations of sulfonylurea repressor shuffling libraries Description of libraries L10, L11, L12, L13, L15 and resulting sequence incorporation biases. A dash (“-”) indicates no amino acid diversity introduced at that position in that library. An X indicates that the library oligonucleotides were designed to introduce complete amino acid diversity (any of 20 amino acids) at that position in that library. Residues in bold indicate bias during selection with larger font size indicating a greater degree of bias in the selected population. Residues in parentheses indicate selected mutations.

[0016] FIG. 10 provides B-galactosidase assays of hits from saturation mutagenesis at position D178.

[0017] FIG. 11 shows the proximity of residues L131 and T134 to the sulfonylurea differentiating side groups of Chlorsulfuron bound CsR(CsL4.2-20).

### DETAILED DESCRIPTION

[0018] The present inventions now will be described more fully hereinafter with reference to the accompanying drawings, in which some, but not all embodiments of the inventions are shown. Indeed, these inventions may be embodied in many different forms and should not be construed as limited to the embodiments set forth herein; rather, these embodiments are provided so that this disclosure will satisfy applicable legal requirements. Like numbers refer to like elements throughout.

[0019] Many modifications and other embodiments of the inventions set forth herein will come to mind to one skilled in the art to which these inventions pertain having the benefit of the teachings presented in the foregoing descriptions and the associated drawings. Therefore, it is to be understood that the inventions are not to be limited to the specific embodiments disclosed and that modifications and other embodiments are intended to be included within the scope of the appended claims. Although specific terms are employed herein, they are used in a generic and descriptive sense only and not for purposes of limitation.

### I. Overview

[0020] One of the main limitations of any chemically inducible system in multicellular organisms is the penetration and even distribution of the inducer throughout all tissues (due to variable movement or metabolism). The result is the possibility of uneven (or lack of) targeted gene induction in the tissues or cell types of interest. To address this limitation, methods and compositions are provided which employ additional genetic factors to affect the spread of de-repression.

[0021] Specifically, the compositions and methods disclosed herein employ a chemical-gene switch. The chemical-gene switch, disclosed herein comprises at least three components. The first component comprises a polynucleotide encoding a chemically-regulated transcriptional repressor; the second component comprises a repressible promoter operably linked to a polynucleotide of interest, and the third component comprises a gene silencing construct operably linked to a second repressible promoter, wherein the gene silencing construct encodes a silencing element that decreases the level of the chemically-regulated transcriptional repressor. Expression of the polynucleotide of interest and the silencing construct is controlled by providing the appropriate chemical ligand. Transient induction from the chemical ligand leads to the production of the silencing element, and a decrease in the level of the chemically-regulated transcriptional repressor. The presence of the silencing element maintains a state of de-repression. Since, in some embodiments, the silencing elements are cell non-autonomous, the state of de-repression becomes distributed throughout the plant beyond where the chemical ligand physically reaches.

[0022] As explained in further detail herein, the activity of the chemical-gene switch can be controlled by selecting the combination of elements used in the switch. These include, but are not limited to, the type of promoter operably linked to the chemically-regulated transcriptional repressor, the chemically-regulated transcriptional repressor, the repressible promoter operably linked to the polynucleotide of interest, the polynucleotide of interest, the repressible promoter operably linked to the gene silencing construct, and the gene silencing construct. Further control is provided by selection, dosage, conditions, and/or timing of the application of the chemical ligand.

### II. Components of the Chemical-Gene Switch

[0023] The compositions and methods disclosed herein employ a chemical-gene switch comprising a polynucleotide of interest construct; a chemically-regulated transcriptional repressor construct; and a gene silencing construct encoding a silencing element that decreases the level of the chemically-regulated transcriptional repressor. Each of these components is discussed in more detail below.

[0024] 1. Polynucleotide Encoding a Chemically-Regulated Transcriptional Repressor

[0025] a. Chemically-Regulated Transcriptional Repressor

[0026] As used herein, a “chemically-regulated transcriptional repressor” comprises a polypeptide that contains a DNA binding domain and a ligand binding domain. In the absence of the chemical ligand, the chemically-regulated transcriptional repressor binds an operator of a promoter and represses the activity of the promoter and thereby represses expression of the polynucleotide operably linked to said promoter. In the presence of an effective concentration of the chemical ligand, the chemically-regulated transcriptional repressor will bind the chemical ligand. The ligand-bound chemically-regulated transcriptional repressor can no longer repress transcription from the promoter containing the operator. Variants and fragments of a chemically-regulated transcriptional repressor will retain this activity.

[0027] By “repress transcription” is intended to mean a reduction or an elimination of transcription of a given polynucleotide. Repression of transcription can therefore comprise the complete elimination of transcription from a given promoter or it can comprise a reduction in the amount of transcription from the promoter when compared to the level of transcription occurring from an appropriate control in the absence of the chemical ligand. A reduction can comprise any statistically significant decrease including, a decrease of at least 1%, 5%, 10%, 20%, 30%, 40%, 50%, 60%, 70%, 80%, 90%, 100%, 150%, 200% or greater or at least a 1, 2, 3, 4, 5, 6, 7, 8, 9, or 10 fold decrease.

[0028] A variety of chemically-regulated transcriptional repressors can be employed in the methods and compositions disclosed herein. In one embodiment, the chemically-regulated transcriptional repressor is a tetracycline transcriptional repressor (TetR), whose binding to an operator is influenced by tetracycline or a derivative thereof. In one embodiment, the chemically-regulated transcription repressor is from the tetracycline class A, B, C, D, E, G, H, J and Z of repressors. An example of the TetR(A) class is found on the Tn1721 transposon and deposited under GenBank accession X61307, cross-referenced under gi48198, with encoded protein accession CAA43639, cross-referenced under gi48195 and UniProt accession Q56321. An example of the TetR(B) class is found on the Tn10 transposon and deposited under GenBank accession X00694, cross-referenced under gi43052, with encoded protein accession CAA25291, cross-referenced under gi43052 and UniProt accession PO4483. An example of the TetR(C) class is found on the pSC101 plasmid and deposited under GenBank Accession M36272, cross-referenced under gi150945, with encoded protein accession AAA25677, cross-referenced under gi150946. An example of the TetR(D) class is found in Salmonella ordonez and deposited under GenBank Accession X65876, cross-referenced under gi49073, with encoded protein accession CAA46707, cross-referenced under gi49075 and UniProt accessions POACT5 and P09164. An example of the TetR(E) class was isolated from E. coli transposon Tn10 and deposited under GenBank Accession M34933, cross-referenced under gi155019, with encoded protein accession AAA98409, cross-referenced under gi155020. An example of the TetR(G) class was isolated from Vibrio anguillarium and deposited under GenBank Accession S52438, cross-referenced under gi262928, with encoded protein accession AAB24797, cross-referenced under gi262929. An example of the TetR(H) class is found on plasmid pMV111 isolated from Pasteurella multocida and deposited under GenBank Accession U00792, cross-referenced under gi392871, with encoded protein accession AAC43249, cross-referenced under gi392872. An example of the TetR(J) class was isolated from Proteus mirabilis and deposited under GenBank Accession AF038993, cross-referenced under gi4104704, with encoded protein accession AAD12754, cross-referenced under gi4104706. An example of the TetR(Z) class was found on plasmid pAGI isolated from Corynebacterium glutamicum and deposited under GenBank Accession AF121000, cross-referenced under gi4583389, with encoded protein accession AAD25064, cross-referenced under gi4583390. In other examples the wild type tetracycline repressor is a class B tetracycline repressor protein, or the wild type tetracycline repressor is a class D tetracycline repressor protein. The properties, domains, motifs and function of tetracycline transcriptional repressors are well known, as are standard techniques and assays to evaluate any derived repressor comprising one or more amino acid substitutions.

[0029] Numerous variants of TetR have been identified and/or derived and extensively studied. In the context of the tetracycline transcriptional repressor system, the effects of various mutations, modifications and/or combinations thereof have been used to extensively characterize and/or modify the properties of tetracycline repressors, such as cofactor binding, ligand binding constants, kinetics and dissociation constants, operator binding sequence constraints, cooperativity, binding constants, kinetics and dissociation constants and fusion protein activities and properties. Variants include TetR variants with a reverse phenotype of binding the operator sequence in the presence of tetracycline or an analog thereof, variants having altered operator binding properties, variants having altered operator sequence specificity and variants having altered ligand specificity and fusion proteins. See, for example, Isackson & Bertrand (1985) PNAS 82:6226-6230; Smith & Bertrand (1988) J Mol Biol 203:949-959; Altschmied et al. (1988) EMBO J7:4011-4017; Wissmann et al. (1991) EMBO J 10:4145-4152; Baumeister et al. (1992) J Mol Biol 226:1257-1270; Baumeister et al. (1992) Proteins 14:168-177; Gossen & Bujard (1992) PNAS 89:5547-5551; Wasylewski et al. (1996) J Protein Chem 15:45-58; Berens et al. (1997) J Biol Chem 272:6936-6942; Baron et al. (1997) Nucl Acids Res 25:2723-2729; Helbl & Hillen (1998) J Mol Biol 276:313-318; Urlinger et al. (2000) PNAS 97:7963-7968; Kamionka et al. (2004) Nucl Acids Res 32:842-847; Bertram et al. (2004) J Mol Microbiol Biotechnol 8:104-110; Scholz et al. (2003) J Mol Biol 329: 217-227; and US2003/0186281, each of which is herein incorporated by reference in its entirety.

[0030] The modular architecture of chemically-regulated transcriptional repressor proteins and the commonality of helix-turn-helix DNA binding domains allows for the creation of sulfonylurea-responsive repressor polypeptides. Thus, in some embodiments, the chemically-regulated transcription repressor comprises a sulfonylurea-responsive transcriptional repressor (SuR) polypeptide. As used herein, a “sulfonylurea-responsive transcriptional repressor” or “SuR” comprises any chemically-regulated transcriptional repressor polypeptide whose binding to an operator sequence is controlled by a ligand comprising a sulfonylurea compound or a derivative thereof. In the absence of the sulfonylurea chemical ligand, the SuR binds a given operator of a promoter and represses the activity of the promoter and thereby represses expression of the polynucleotide operably linked to said promoter. Upon interaction of the SuR with its chemical ligand, the SuR is no longer able to repress transcription of the promoter containing the operator.

[0031] The SuR can be designed to contain a variety of different DNA binding domains and thereby bind a variety of different operators and influence transcription. In one embodiment, the SuR polypeptide comprises a DNA binding domain that specifically binds to a tetracycline operator. Thus, in specific embodiments, the SuR polypeptide or the polynucleotide encoding the same can comprise a DNA binding domain, including but not limited to, an operator DNA binding domain from repressors included tet, lac, trp, phd, arg, LexA, phiCh1 repressor, lambda C1 and Cro repressors, phage X repressor, MetJ, phir1t rro, phi434 C1 and Cro repressors, RafR, gal, ebg, uxuR, exuR, ROS, SinR, PurR, FruR, P22 C2, TetC, AcrR, Betl, Bm3R1, EnvR, QacR, MtrR, TcmR, Ttk, YbiH, YhgD, and mu Ner, or DNA binding domains in Interpro families including, but not limited to, IPR001647, IPR010982, and IPR01199, or an active variant or fragment thereof. Thus, the DNA binding specificity can be altered by fusing a SuR ligand binding domain to an alternate DNA binding domain. For example, the DNA binding domain from TetR class D can be fused to a SuR ligand binding domain to create SuR polypeptides that specifically bind to polynucleotides comprising a class D tetracycline operator. In some examples, a DNA binding domain variant or derivative can be used. For example, a DNA binding domain from a TetR variant that specifically recognizes a tetO-4C operator or a tetO-6C operator could be used (Helbl & Hillen (1998) J Mol Biol 276:313-318; Helbl et al. (1998) J Mol Biol 276:319-324).

[0032] In some examples, the chemically-regulated transcriptional repressor, or the polynucleotide encoding the same, includes a SuR polypeptide comprising a ligand binding domain comprising at least one amino acid substitution to a wild type tetracycline repressor protein ligand binding domain fused to a heterologous operator DNA binding domain which specifically binds to a polynucleotide comprising the operator sequence or derivative thereof, wherein repressor-operator binding is regulated by the absence or presence of a sulfonylurea compound. In specific embodiments, the heterologous operator DNA binding domain comprises a tetracycline operator sequence or active variant or fragment thereof, such that the repressor-operator binding is regulated by the absence or presence of a sulfonylurea compound. Non-limiting examples of SuR polypeptides are set forth in U.S. Utility application Ser. No. 13/086,765, filed on Apr. 14, 2011 and in US Application Publication 2010-0105141, both of which are herein incorporated by reference in their entirety.

[0033] In some examples, the SuR polypeptides, or polynucleotide encoding the same, comprise an amino acid substitution in the ligand binding domain of a wild type tetracycline repressor protein. In class B and D wild type TetR proteins, amino acid residues 6-52 represent the DNA binding domain. The remainder of the protein is involved in dimerization, ligand binding and subsequent allosteric modification. For class B TetR residues 53-207 represent the ligand binding domain, while residues 53-218 comprise the ligand binding domain for the class D TetR. In some embodiments, the SuR polypeptides comprise at least one amino acid substitution in the ligand binding domain of a wild type TetR(B) protein.

[0034] In some examples, the SuR polypeptide, or polynucleotide encoding the same, comprise an amino acid, or any combination of amino acids, corresponding to equivalent amino acid positions selected from the amino acid diversity shown in FIG. 6, wherein the amino acid residue position shown in FIG. 6 corresponds to the amino acid numbering of a wild type TetR(B). In some examples, the SuR polypeptides (or the polynucleotides encoding the same) comprise a ligand binding domain comprising at least 10%, 20%, 30%, 40%, 50%, 55%, 60%, 65%, 66%, 67%, 68%, 69%, 70%, 71%, 72%, 73%, 74%, 75%, 76%, 77%, 78%, 79%, 80%, 81%, 82%, 83%, 84%, 85%, 86%, 87%, 88%, 89%, 90%, 91%, 92%, 93%, 94%, 95%, 96%, 97%, 98%, 99% or 100% sequence identity to the amino acid residues shown in FIG. 6, wherein the amino acid residue position corresponds to the equivalent position using the amino acid numbering of a wild type TetR(B). In some examples, the wild type TetR(B) is SEQ ID NO:1.

[0035] In other examples, the SuR polypeptide, or polynucleotide encoding the same, comprises a ligand binding domain comprising at least one amino acid substitution at a residue position selected from the group consisting of position 55, 60, 64, 67, 82, 86, 100, 104, 105, 108, 113, 116, 134, 135, 138, 139, 147, 151, 170, 173, 174, 177 and any combination thereof, wherein the amino acid residue position and substitution corresponds to the equivalent position using the amino acid numbering of a wild type TetR(B). In some examples, the SuR polypeptide further comprises at least one amino acid substitution at an amino acid residue position selected from the group consisting of 109, 112, 117, 131, 137, 140, 164 and any combination thereof. In some examples, the wild type TetR(B) is SEQ ID NO:1.

[0036] In other embodiments, the SuR polypeptide, or polynucleotide encoding the same, comprises at least about 50% 60%, 65%, 66%, 67%, 68%, 69%, 70%, 71%, 72%, 73%, 74%, 75%, 76%, 77%, 78%, 79%, 80%, 81%, 82%, 83%, 84%, 85%, 86%, 87%, 88%, 89%, 90%, 91%, 92%, 93%, 94%, 95%, 96%, 97%, 98% or 99% sequence identity to the ligand binding domain of a wild type TetR(B) exemplified by amino acid residues 53-207 of SEQ ID NO:1, wherein the sequence identity is determined over the full length of the ligand binding domain using a global alignment method. In some examples the global alignment method uses the GAP algorithm with default parameters for an amino acid sequence % identity and % similarity using GAP Weight of 8 and Length Weight of 2, and the BLOSUM62 scoring matrix.

[0037] In other examples, the SuR polypeptide, or polynucleotide encoding the same, comprises at least about 50% 60%, 65%, 66%, 67%, 68%, 69%, 70%, 71%, 72%, 73%, 74%, 75%, 76%, 77%, 78%, 79%, 80%, 81%, 82%, 83%, 84%, 85%, 86%, 87%, 88%, 89%, 90%, 91%, 92%, 93%, 94%, 95%, 96%, 97%, 98% or 99% sequence identity to a wild type TetR(B) exemplified by SEQ ID NO:1, wherein the sequence identity is determined over the full length of the polypeptide using a global alignment method. In some examples the global alignment method uses the GAP algorithm with default parameters for an amino acid sequence % identity and % similarity using GAP Weight of 8 and Length Weight of 2, and the BLOSUM62 scoring matrix.

[0038] Additional SuR polypeptides, or polynucleotide encoding the same, comprising at least about 50% 60%, 65%, 66%, 67%, 68%, 69%, 70%, 71%, 72%, 73%, 74%, 75%, 76%, 77%, 78%, 79%, 80%, 81%, 82%, 83%, 84%, 85%, 86%, 87%, 88%, 89%, 90%, 91%, 92%, 93%, 94%, 95%, 96%, 97%, 98% or 99% sequence identity to the ligand binding domain of a SuR polypeptide selected from the group consisting of SEQ ID NO:3-419, 863-870, 884-889, 1381-1568 and/or 2030-2110, wherein the sequence identity is determined over the full length of the ligand binding domain using a global alignment method. The ligand binding domain of SEQ ID NO: 3-419, 863-870, 884-889, 1381-1568 and/or 2030-2110 comprises amino acids 53-207. In some examples the global alignment method uses the GAP algorithm with default parameters for an amino acid sequence % identity and % similarity using GAP Weight of 8 and Length Weight of 2, and the BLOSUM62 scoring matrix.

[0039] In other examples, the SuR polypeptide, or polynucleotide encoding the same, have at least about 50% 60%, 65%, 66%, 67%, 68%, 69%, 70%, 71%, 72%, 73%, 74%, 75%, 76%, 77%, 78%, 79%, 80%, 81%, 82%, 83%, 84%, 85%, 86%, 87%, 88%, 89%, 90%, 91%, 92%, 93%, 94%, 95%, 96%, 97%, 98% or 99% sequence identity to a SuR polypeptide selected from the group consisting of SEQ ID NO:3-419, 863-870, 884-889, 1381-1568 and/or 2030-2110, wherein the sequence identity is determined over the full length of the polypeptide using a global alignment method. In some examples the global alignment method uses the GAP algorithm with default parameters for an amino acid sequence % identity and % similarity using GAP Weight of 8 and Length Weight of 2, and the BLOSUM62 scoring matrix.

[0040] Non-limiting examples of SuR polypeptides, or polynucleotide encoding the same, comprise an amino acid sequence that can be optimally aligned with a polypeptide sequence of L7-1A04 (SEQ ID NO:220), L1-22 (SEQ ID NO:7), L1-29 (SEQ ID NO:10), L1-02 (SEQ ID NO:3), L1-07 (SEQ ID NO:4), L1-20 (SEQ ID NO:6), L1-44 (SEQ ID NO:13), L6-3A09 (SEQ ID NO:402), L6-3H02 (SEQ ID NO:94), L7-4E03 (SEQ ID NO:403), L10-84(B12) (SEQ ID NO:404), or L13-46 (SEQ ID NO:405) to generate a percent sequence identity of at least 50% 60%, 65%, 66%, 67%, 68%, 69%, 70%, 71%, 72%, 73%, 74%, 75%, 76%, 77%, 78%, 79%, 80%, 81%, 82%, 83%, 84%, 85%, 86%, 87%, 88%, 89%, 90%, 91%, 92%, 93%, 94%, 95%, 96%, 97%, 98% or 99% sequence identity, wherein the sequence identity is determined by BLAST alignment using the BLOSUM62 matrix, a gap existence penalty of 11, and a gap extension penalty of 1. In some examples, the SuR polypeptides, or polynucleotide encoding the same, comprise an amino acid sequence that can be optimally aligned with a polypeptide sequence of L7-1A04 (SEQ ID NO:220) to generate a percent sequence identity of at least 88% sequence identity, optimally aligned with a polypeptide sequence of L1-22 (SEQ ID NO:7) to generate a percent sequence identity of at least 92% sequence identity, optimally aligned with a polypeptide sequence of L1-07 (SEQ ID NO:4) to generate a percent sequence identity of at least 93% sequence identity, optimally aligned with a polypeptide sequence of L1-20 (SEQ ID NO:6) to generate a percent sequence identity of at least 93% sequence identity, optimally aligned with a polypeptide sequence of L1-44 (SEQ ID NO:13) to generate a percent sequence identity of at least 93% sequence identity, optimally aligned with a polypeptide sequence of L6-3H02 (SEQ ID NO:94) to generate a percent sequence identity of at least 90% sequence identity, optimally aligned with a polypeptide sequence of L10-84(B12) (SEQ ID NO:404) to generate a percent sequence identity of at least 86% sequence identity, or optimally aligned with a polypeptide sequence of L13-46 (SEQ ID NO:405) to generate a percent sequence identity of at least 86% sequence identity, wherein the sequence identity is determined by BLAST alignment using the BLOSUM62 matrix, a gap existence penalty of 11, and a gap extension penalty of 1. In some examples the percent identity is determined using a global alignment method using the GAP algorithm with default parameters for an amino acid sequence % identity and % similarity using GAP Weight of 8 and Length Weight of 2, and the BLOSUM62 scoring matrix.

[0041] In further embodiments, the SuR polypeptides, or polynucleotide encoding the same, comprise an amino acid sequence that can be optimally aligned with a polypeptide sequence of L7-1A04 (SEQ ID NO:220), L1-22 (SEQ ID NO:7), L1-29 (SEQ ID NO:10), L1-02 (SEQ ID NO:3), L1-07 (SEQ ID NO:4), L1-20 (SEQ ID NO:6), L1-44 (SEQ ID NO:13), L6-3A09 (SEQ ID NO:402), L6-3H02 (SEQ ID NO:94), L7-4E03 (SEQ ID NO:403), L10-84(B12) (SEQ ID NO:404), or L13-46 (SEQ ID NO:405) to generate a BLAST similarity score of at least 400, 425, 450, 475, 500, 525, 550, 575, 600, 625, 650, 675, 700, 750, 800, 850, 900, 910, 920, 930, 940, 950, 960, 970, 980, 990, 1000, 1010, 1020, 1030, 1040, 1050, 1060, 1070, 1080, 1090, 1100, 1110, 1120, 1130, 1140, 1150, 1160, 1170, 1180, 1190, or 1200 wherein the BLAST alignment used the BLOSUM62 matrix, a gap existence penalty of 11, and a gap extension penalty of 1.

[0042] In some examples, the SuR polypeptides, or polynucleotide encoding the same, comprise an amino acid sequence that can be optimally aligned with a polypeptide sequence of L1-29 (SEQ ID NO:10) to generate a BLAST similarity score of at least 1006, optimally aligned with a polypeptide sequence of L1-07 (SEQ ID NO:4) to generate a BLAST similarity score of at least 996, optimally aligned with a polypeptide sequence of L6-3A09 (SEQ ID NO:402) to generate a BLAST similarity score of at least 978, optimally aligned with a polypeptide sequence of L7-4E03 (SEQ ID NO:403) to generate a BLAST similarity score of at least 945, or optimally aligned with a polypeptide sequence of L13-46 (SEQ ID NO:405) to generate a BLAST similarity score of at least 819, wherein the BLAST alignment used the BLOSUM62 matrix, a gap existence penalty of 11, and a gap extension penalty of 1.

[0043] In some examples, the SuR polypeptides, or polynucleotide encoding the same, comprise a ligand binding domain from a polypeptide selected from the group consisting of SEQ ID NO:3-419, 863-870, 884-889, 1381-1568 and/or 2030-2110. In some examples, the SuR polypeptides, or polynucleotide encoding the same, comprise an amino acid sequence selected from the group consisting of SEQ ID NO:3-419. In some examples the isolated SuR polypeptide is selected from the group consisting of SEQ ID NO:3-419, 863-870, 884-889, 1381-1568 and/or 2030-2110, and the sulfonylurea compound is selected from the group consisting of a chlorsulfuron, an ethametsulfuron, a metsulfuron, a sulfometuron, a tribenuron, a chlorimuron, a nicosulfuron, a rimsulfuron and a thifensulfuron.

[0044] In non-limiting embodiments, the SuR polypeptides can have an equilibrium binding constant for a sulfonylurea compound greater than 0.1 nM and less than 10 μM. In some examples, the SuR polypeptide has an equilibrium binding constant for a sulfonylurea compound of at least 0.1 nM, 0.5 nM, 1 nM, 10 nM, 50 nM, 100 nM, 250 nM, 500 nM, 750 nM, 1 μM, 5 μM, 7 μM but less than 10 μM. In other examples, the SuR polypeptide has an equilibrium binding constant for a sulfonylurea compound of at least 0.1 nM, 0.5 nM, 1 nM, 10 nM, 50 nM, 100 nM, 250 nM, 500 nM, 750 nM but less than 1 μM. In some embodiments, the SuR polypeptide has an equilibrium binding constant for a sulfonylurea compound greater than 0 nM, but less than 0.1 nM, 0.5 nM, 1 nM, 10 nM, 50 nM, 100 nM, 250 nM, 500 nM, 750 nM, 1 μM, 5 μM, 7 μM or 10 μM. In some examples, the sulfonylurea compound is a chlorsulfuron, an ethametsulfuron, a metsulfuron, a sulfometuron, a tribenuron, a chlorimuron, a nicosulfuron, a rimsulfuron and/or a thifensulfuron.

[0045] In some examples, the SuR polypeptides have an equilibrium binding constant for an operator sequence greater than 0.1 nM and less than 10 μM. In some examples the SuR polypeptide has an equilibrium binding constant for an operator sequence of at least 0.1 nM, 0.5 nM, 1 nM, 10 nM, 50 nM, 100 nM, 250 nM, 500 nM, 750 nM, 1 μM, 5 μM, 7 μM but less than 10 μM. In some examples, the SuR polypeptide has an equilibrium binding constant for an operator sequence of at least 0.1 nM, 0.5 nM, 1 nM, 10 nM, 50 nM, 100 nM, 250 nM, 500 nM, 750 nM but less than 1 μM. In some examples the SuR polypeptide has an equilibrium binding constant for an operator sequence greater than 0 nM, but less than 0.1 nM, 0.5 nM, 1 nM, 10 nM, 50 nM, 100 nM, 250 nM, 500 nM, 750 nM, 1 μM, 5 μM, 7 μM or 10 μM. In some examples, the operator sequence is a Tet operator sequence. In some examples, the Tet operator sequence is a TetR(A) operator sequence, a TetR(B) operator sequence, a TetR(D) operator sequence, TetR(E) operator sequence, a TetR(H) operator sequence, or a functional derivative thereof.

[0046] Various chemical ligands, including exemplary sulfonylurea chemical ligands, and the level and manner of application are discussed in detail elsewhere herein.

[0047] b. Promoters for Expression of the Chemically-Regulated Transcriptional Repressor

[0048] The polynucleotide encoding the chemically-regulated transcriptional repressor is operably linked to a promoter that is active in a plant. Various promoters can be employed and non-limiting examples are set forth elsewhere herein. Briefly, the polynucleotide encoding the chemically-regulated transcriptional repressor can be operably linked to constitutive promoter, an inducible promoter, or tissue-preferred promoter. In specific embodiments, the chemically-regulated transcriptional repressor is operably linked to a non-constitutive promoter, including but not limited to a tissue-preferred promoter, an inducible promoter, a repressible promoter, a developmental stage preferred promoter, or a promoter having more than one of these properties. In some examples expression of the polynucleotide of interest is primarily regulated in roots, leaves, stems, flowers, silks, anthers, pollen, meristem, germline, seed, endosperm, embryos, or progeny.

[0049] In other embodiments, the chemically-regulated transcriptional repressor can be operably linked to a repressible promoter, thus allowing the chemically-regulated transcriptional repressor to auto-regulate its own expression. It has been mathematically predicted that negative auto-regulation would not only dampen fluctuations in gene expression but also enhance signal response time in regulatory circuits involving repressor molecules (Savageau (1974) Nature 252:542-549). This principle was demonstrated in E. coli using synthetic gene circuitry (Rosenfeld et al. (2002) J Mol Biol 323:785-793) and in yeast (Nevozhay (2009) Proc Natl Acad Sci USA 106:5123-5128). Thus, in specific embodiments, the polynucleotide encoding the chemically-regulated transcriptional repressor can be operably linked to a repressible promoter comprising at least one, two, three or more operators (including a tet operator, such as that set forth in SEQ ID NO:848 or an active variant or fragment thereof) regulating expression of said repressor. Non-limiting repressible promoters for expression of the chemically-regulated transcriptional repressor, include the repressible promoters set forth in SEQ ID NO:885, 856, 857, 858, 859, or 860 or active variants and fragments thereof.

[0050] 2. Gene Silencing Construct

[0051] Another component of the chemical-gene switch disclosed herein comprises a polynucleotide comprising a gene silencing construct. The gene silencing construct encodes a silencing element that decreases the level of the chemically regulated transcriptional repressor. Thus, the presence of the silencing element maintains a state of de-repression. In specific embodiments, the silencing elements are cell non-autonomous, the state of de-repression becomes distributed in plant cells, tissues, organs or throughout the plant, beyond where the chemical ligand physically reaches.

[0052] As used herein, the term “cell non-autonomous” in intended that the silencing element initiates a diffusible signal that travels between cells. A cell non-autonomous signal includes both the expansion of the RNA silencing into neighboring plant cells in the form of a “local cell-to-cell” movement or it may occur over longer distances representing “extensive silencing”. Local cell-to-cell movement allows for the signal to spread about 10-15 cells beyond the site of initiation of the expression of the silencing element. This type of spread can occur, but is not limited to, spreading via the plasmodesmata. In other embodiments, the expansion of the silencing into neighboring plant cells results in “extensive silencing”. In such instances, the silencing occurs over distances greater than 10-15 cells from the original cell initiating the signal. In some instances, the signal extends beyond the site of initiation and spreads greater than 15 cells from the initiation site, it spreads throughout a tissue, it spreads throughout an organ, or it spreads systemically through the plant. As used herein, the term “complete penetration” occurs when a sufficient amount of the silencing element is present in a given cell, tissue, organ or entire plant to decrease the level of the chemically-regulated transcriptional repressor to allow for the de-repression of the chemical-gene switch. In still other embodiments, the silencing element is transported by the vasculature of the plant.

[0053] Thus, in specific embodiments, the cell non-autonomous silencing element decreases the level of the chemically-regulated transcriptional repressor such that the effective amount of the chemical ligand to the plant results in the spatially or temporally extended expression of the polynucleotide of interest in the plant as compared to expression in a plant having been contacted with the effective amount of the chemical ligand and lacking the gene silencing construct. In some instances, this effect is achieved by providing an amount of chemical ligand smaller than the amount required to induce expression of said polynucleotide of interest in a plant lacking the silencing construct.

[0054] By “temporally extending expression” is intended the expression occurs in the absence of the ligand for at least 1, 2, 3, 4, 5, 6, 7 days, 1, 2, 3, 4, 5, 6, 7, 8, 9 months or more, or permanently.

[0055] In further embodiments, the expression of the polynucleotide sequence of interest is extended into at least one tissue of the plant which was not contacted by the effective amount of the chemical ligand. In other embodiments, the expression of the polynucleotide of interest is extended such that complete penetration of expression of the polynucleotide of interest in the shoot apical meristem occurs, or such that complete penetration throughout the plant of the expression of the polynucleotide sequence of interest occurs.

[0056] a. Target Sequence

[0057] As used herein, a “target sequence” comprises any sequence that one desires to decrease the level of expression via expression of the silencing element. Within the context of the chemical-gene switch system disclosed herein, the target sequence comprises the chemically-regulated transcriptional repressor or its 5′ or 3′ UTR sequences.

[0058] b. Silencing Element

[0059] By “silencing element” is intended a polynucleotide that is capable of decreasing or eliminating the level or expression of a target polynucleotide or the polypeptide encoded thereby. In the methods and compositions provided herein, the silencing element employed can decrease or eliminate the expression level of the chemically-regulated transcriptional repressor sequence by influencing the level of the RNA transcript of the chemically-regulated transcriptional repressor or, alternatively, by influencing translation and thereby affecting the level of the encoded chemically-regulated transcriptional repressor polypeptide. Methods to assay for functional silencing elements that are capable of decreasing or eliminating the level of the chemically-regulated transcriptional repressor are disclosed elsewhere herein. A single polynucleotide employed in the methods of the invention can comprises one or more silencing elements to the same or different chemically-regulated transcriptional repressor.

[0060] By “decrease” or “decreasing” the level of a polynucleotide or a polypeptide encoded thereby is intended to mean, the polynucleotide or polypeptide level of the target sequence (i.e., the chemically-regulated transcriptional repressor) is statistically lower than the polynucleotide level or polypeptide level of the same target sequence in an appropriate control plant or tissue which is not exposed to (i.e., has not been exposed to the chemical ligand) the silencing element. In particular embodiments, decreasing the polynucleotide level and/or the polypeptide level of the chemically-regulated transcriptional repressor results in a decrease of at least about 95%, 90%, 80%, 70%, 60%, 50%, 40%, 30%, 20%, 10%, 5%, or 1% of the polynucleotide level, or the level of the polypeptide encoded thereby of the chemically-regulated transcriptional repressor, when compared to an appropriate control (i.e., in the absence of the silencing element or the chemical ligand). Methods to assay for the level of the RNA transcript, the level of the encoded polypeptide, or the activity of the chemically-regulated transcriptional repressor are discussed elsewhere herein.

[0061] As discussed in further detail below, silencing elements can include, but are not limited to, a sense suppression element, an antisense suppression element, a double stranded RNA, a miRNA, an amiRNA, or a hairpin suppression element. Non-limiting examples of target sequences include the various chemically-regulated transcriptional repressors discussed elsewhere herein, including the various SuR polypeptides, or polynucleotide encoding the same, such as those set forth in any of SEQ ID NOs:1-836, 863-870, 884-889, 1381-1568 and/or 2030-2110 or active variants and fragments thereof. In some embodiment, the entire chemically-regulated transcriptional repressor, a region comprising the DNA binding domain, a region comprising the ligand binding domain, or the 5′ or 3′ UTR or variants and fragments thereof can be employed in the silencing element.

[0062] In specific embodiments, the silencing element comprises at least or consists of 15, 20, 22, 25 or greater consecutive nucleotides encoding a chemically-regulated transcriptional repressor discussed elsewhere herein, including the various SuR polypeptides, such as those set forth in any of SEQ ID NOs:1-836, 863-870, 884-889, 1381-1568 and/or 2030-2110 or active variants and fragments thereof. In other embodiments, the silencing element comprises at least or consists of a polynucleotide encoding amino acids 1-7, 7-14, 14-21, 14-28, 28-35, 35-42, 42-49, 49-56, 56-63, 63-70, 70-77, 77-84, 84-91, 91-98, 98-105, 105-112, 112-119, 119-126, 126-133, 133-140, 140-147, 147-154, 154-161, 161-168, 168-175, 175-182, 182-189, 189-196, 196-203, or 203-207 of a chemically-regulated transcriptional repressors discussed elsewhere herein, including the various SuR polypeptides, such as those set forth in any of SEQ ID NOs:1-836, 863-870, 884-889, 1381-1568 and/or 2030-2110 or active variants and fragments thereof. Alternatively, the silencing element comprises at least or consists of 15, 20, 22, 25 or greater consecutive nucleotides of the 5′ or 3′ untranslated regions (i.e. 5′UTR or 3′ UTR) of the polynucleotide cassette encoding the chemically-regulated transcriptional repressor or a combination of untranslated and coding sequences.

[0063] i. Antisense Silencing Elements

[0064] As used herein, an “antisense silencing element” comprises a polynucleotide which is designed to express an RNA molecule complementary to all or part of a target messenger RNA. Expression of the antisense RNA suppression element reduces or eliminates the level of the target polynucleotide. The polynucleotide for use in antisense suppression may correspond to all or part of the complement of the sequence encoding the target polynucleotide (i.e., sequence encoding the chemically-regulated transcriptional repressor), all or part of the complement of the 5′ and/or 3′ untranslated region of the target polynucleotide (i.e., sequence encoding the chemically-regulated transcriptional repressor), all or part of the complement of the coding sequence of the target polynucleotide (i.e., sequence encoding the chemically-regulated transcriptional repressor), or all or part of the complement of both the coding sequence and the untranslated regions of the target polynucleotide (i.e., sequence encoding the chemically-regulated transcriptional repressor). In addition, the antisense suppression element may be fully complementary (i.e., 100% identical to the complement of the target sequence) or partially complementary (i.e., less than 100% identical to the complement of the target sequence) to the target polynucleotide. In specific embodiments, the antisense suppression element comprises at least 85%, 90%, 91%, 92%, 93%, 94%, 95%, 96%, 97%, 98%, or 99% sequence identity to the target polynucleotide (i.e., sequence encoding the chemically-regulated transcriptional repressor). Antisense suppression may be used to inhibit the expression of multiple proteins in the same plant. See, for example, U.S. Pat. No. 5,942,657. Furthermore, the antisense suppression element can be complementary to a portion of the target polynucleotide. Generally, sequences of at least 25, 50, 100, 200, 300, 400, 450 nucleotides or greater may be used. Methods for using antisense suppression to inhibit the expression of endogenous genes in plants are described, for example, in Liu et al (2002) Plant Physiol. 129:1732-1743 and U.S. Pat. Nos. 5,759,829 and 5,942,657, each of which is herein incorporated by reference. In specific embodiments, the antisense element comprises or consists of the complement of at least 15, 20, 22, 25 or greater contiguous nucleotides of any one of SEQ ID NO: 1-836, 863-870, 884-889, 1381-1568 and/or 2030-2110.

[0065] ii. Double Stranded RNA Silencing Element

[0066] A “double stranded RNA silencing element” or “dsRNA” comprises at least one transcript that is capable of forming a dsRNA. Thus, a “dsRNA silencing element” includes a dsRNA, a transcript or polyribonucleotide capable of forming a dsRNA or more than one transcript or polyribonucleotide capable of forming a dsRNA. “Double stranded RNA” or “dsRNA” refers to a polyribonucleotide structure formed either by a single self-complementary RNA molecule or a polyribonucleotide structure formed by the expression of least two distinct RNA strands. The dsRNA molecule(s) employed in the methods and compositions of the invention mediate the reduction of expression of a target sequence (i.e., sequence encoding the chemically-regulated transcriptional repressor), for example, by mediating RNA interference “RNAi” or gene silencing in a sequence-specific manner. In the context of the present invention, the dsRNA is capable of decreasing or eliminating the level or expression of the polypeptide encoded the chemically-regulated transcriptional repressor.

[0067] The dsRNA can decrease or eliminate the expression level of the target sequence by influencing the level of the target RNA transcript, by influencing translation and thereby affecting the level of the encoded polypeptide, or by influencing expression at the pre-transcriptional level (i.e., via the modulation of chromatin structure, methylation pattern, etc., to alter gene expression). See, for example, Verdel et al. (2004) Science 303:672-676; Pal-Bhadra et al. (2004) Science 303:669-672; Allshire (2002) Science 297:1818-1819; Volpe et al. (2002) Science 297:1833-1837; Jenuwein (2002) Science 297:2215-2218; and Hall et al. (2002) Science 297:2232-2237. Methods to assay for functional RNAi that are capable of reducing or eliminating the level of a sequence of interest are disclosed elsewhere herein. Accordingly, as used herein, the term “dsRNA” is meant to encompass other terms used to describe nucleic acid molecules that are capable of mediating RNA interference or gene silencing, including, for example, short-interfering RNA (siRNA), double-stranded RNA (dsRNA), hairpin RNA, short hairpin RNA (shRNA), trans-acting siRNA (TAS), post-transcriptional gene silencing RNA (ptgsRNA), and others.

[0068] In specific embodiments, at least one strand of the duplex or double-stranded region of the dsRNA shares sufficient sequence identity or sequence complementarity to the polynucleotide encoding the chemically-regulated transcriptional regulator to allow for the dsRNA to reduce the level of expression of the chemically-regulated transcriptional regulator. As used herein, the strand that is complementary to the target polynucleotide is the “antisense strand” and the strand homologous to the target polynucleotide is the “sense strand.”

[0069] In one embodiment, the dsRNA comprises a hairpin RNA. A hairpin RNA comprises an RNA molecule that is capable of folding back onto itself to form a double stranded structure. Multiple structures can be employed as hairpin elements. In specific embodiments, the dsRNA suppression element comprises a hairpin element which comprises in the following order, a first segment, a second segment, and a third segment, where the first and the third segment share sufficient complementarity to allow the transcribed RNA to form a double-stranded stem-loop structure.

[0070] The “second segment” of the hairpin comprises a “loop” or a “loop region.” These terms are used synonymously herein and are to be construed broadly to comprise any nucleotide sequence that confers enough flexibility to allow self-pairing to occur between complementary regions of a polynucleotide (i.e., segments 1 and 2 which form the stem of the hairpin). For example, in some embodiments, the loop region may be substantially single stranded and act as a spacer between the self-complementary regions of the hairpin stem-loop. In some embodiments, the loop region can comprise a random or nonsense nucleotide sequence and thus not share sequence identity to a target polynucleotide. In other embodiments, the loop region comprises a sense or an antisense RNA sequence or fragment thereof that shares identity to a target polynucleotide. See, for example, International Patent Publication No. WO 02/00904, which is herein incorporated by reference. In specific embodiments, the loop region can be optimized to be as short as possible while still providing enough intramolecular flexibility to allow the formation of the base-paired stem region. In other embodiments, the loop region comprises a spliceable or non-spliceable intron. Accordingly, the loop sequence is generally less than 1000, 900, 800, 700, 600, 500, 400, 300, 200, 100, 50, 25, 20, 15, 10 nucleotides or less.

[0071] The “first” and the “third” segment of the hairpin RNA molecule comprise the base-paired stem of the hairpin structure. The first and the third segments are inverted repeats of one another and share sufficient complementarity to allow the formation of the base-paired stem region. In specific embodiments, the first and the third segments are fully complementary to one another. Alternatively, the first and the third segment may be partially complementary to each other so long as they are capable of hybridizing to one another to form a base-paired stem region. The amount of complementarity between the first and the third segment can be calculated as a percentage of the entire segment. Thus, the first and the third segment of the hairpin RNA generally share at least 50%, 60%, 70%, 80%, 85%, 90%, 91%, 92%, 93%, 94%, 95%, 96%, 97%, 98%, 99%, up to and including 100% complementarity.

[0072] The first and the third segment are at least about 1000, 500, 400, 300, 200, 100, 50, 40, 30, 25, 22, 20, or 19 nucleotides in length. In specific embodiments, the length of the first and/or the third segment is about 10-100 nucleotides, about 10 to about 75 nucleotides, about 10 to about 50 nucleotides, about 10 to about 40 nucleotides, about 10 to about 35 nucleotides, about 10 to about 30 nucleotides, about 10 to about 25 nucleotides, about 10 to about 20 nucleotides. In other embodiments, the length of the first and/or the third segment comprises at least 10-20 nucleotides, 20-35 nucleotides, 30-45 nucleotides, 40-50 nucleotides, 50-100 nucleotides, or 100-300 nucleotides. See, for example, International Publication No. WO 0200904. In specific embodiments, the first and the third segment comprise at least 20 nucleotides having at least 85% complementary to the first segment. In still other embodiments, the first and the third segments which form the stem-loop structure of the hairpin comprises 3′ or 5′ overhang regions having unpaired nucleotide residues.

[0073] In specific embodiments, the sequences used in the first, the second, and/or the third segments comprise domains that are designed to have sufficient sequence identity to a target polynucleotide (i.e., polynucleotide encoding the chemically-regulated transcriptional regulator) and thereby have the ability to decrease the level of the target polynucleotide. The specificity of the inhibitory RNA transcripts is therefore generally conferred by these domains of the silencing element. Thus, in some embodiments of the invention, the first, second and/or third segment of the silencing element comprise a domain having at least 10, at least 15, at least 19, at least 20, at least 21, at least 22, at least 23, at least 24, at least 25, at least 30, at least 40, at least 50, at least 100, at least 200, at least 300, at least 500, at least 1000, or more than 1000 nucleotides that share sufficient sequence identity to the polynucleotide encoding the chemically-regulated transcriptional regulator to allow for a decrease in expression levels of the target polynucleotide when expressed in an appropriate cell (i.e., any one of SEQ ID NO: 1-836, 863-870, 884-889, 1381-1568 and/or 2030-2110 or the polynucleotide encoding the same). In other embodiments, the domain is between about 15 to 50 nucleotides, about 20-35 nucleotides, about 25-50 nucleotides, about 20 to 75 nucleotides, about 40-90 nucleotides about 15-100 nucleotides of the chemically-regulated transcriptional repressor.

[0074] In specific embodiments, the domain of the first, the second, and/or the third segment has 100% sequence identity to the polynucleotide encoding the chemically-regulated transcriptional regulator, promoter, 5′ UTR or 3′ UTR. In other embodiments, the domain of the first, the second and/or the third segment having homology to the target polypeptide have at least 50%, 60%, 70%, 80%, 85%, 90%, 91%, 92%, 93%, 94%, 95%, 96%, 97%, 98%, 99%, or greater sequence identity to a region of the polynucleotide encoding the chemically-regulated transcriptional regulator. The sequence identity of the domains of the first, the second and/or the third segments to the target polynucleotide need only be sufficient to decrease expression of the target polynucleotide of interest. See, for example, Chuang and Meyerowitz (2000) Proc. Natl. Acad. Sci. USA 97:4985-4990; Stoutjesdijk et al. (2002) Plant Physiol. 129:1723-1731; Waterhouse and Helliwell (2003) Nat. Rev. Genet. 4:29-38; Pandolfini et al. BMC Biotechnology 3:7, and U.S. Patent Publication No. 20030175965; each of which is herein incorporated by reference. A transient assay for the efficiency of hpRNA constructs to silence gene expression in vivo has been described by Panstruga et al. (2003) Mol. Biol. Rep. 30:135-140, herein incorporated by reference.

[0075] The amount of complementarity shared between the first, second, and/or third segment and the target polynucleotide or the amount of complementarity shared between the first segment and the third segment (i.e., the stem of the hairpin structure) may vary depending on the plant in which gene expression is to be controlled. Some plants or cell types may require exact pairing or 100% identity, while other plants or cell types may tolerate some mismatching. In some cells, for example, a single nucleotide mismatch in the targeting sequence abrogates the ability to suppress gene expression.

[0076] Any region of the polynucleotide encoding the chemically-regulated transcriptional regulator can be used to design the domain of the silencing element that shares sufficient sequence identity to allow expression of the hairpin transcript to decrease the level of the chemically-regulated transcriptional regulator. For instance, the domain can be designed to share sequence identity to the 5′ untranslated region of the polynucleotide encoding the chemically-regulated transcriptional regulator, the 3′ untranslated region of the polynucleotide encoding the chemically-regulated transcriptional regulator, exonic regions of the polynucleotide encoding the chemically-regulated transcriptional regulator, intronic regions of the polynucleotide encoding the chemically-regulated transcriptional regulator, and any combination thereof. In specific embodiments a domain of the silencing element shares sufficient homology to at least about 15 consecutive nucleotides from about nucleotides 1-50, 50-100, 100-150, 150-200, 200-250, 250-300, 300-350, 350-400, 400-450, 450-500, 550-600, 600-650, 650-700, 750-800, 850-900, 950-1000, 1000-1050, 1050-1100, 1100-1200, 1200-1300, 1300-1400, 1400-1500, 1500-1600, 1600-1700, 1700-1800, 1800-1900, 1900-2000 of the polynucleotide encoding the chemically-regulated transcriptional regulator. In some instances to optimize the siRNA sequences employed in the hairpin, the synthetic oligodeoxyribonucleotide/RNAse H method can be used to determine sites on the target mRNA that are in a conformation that is susceptible to RNA silencing. See, for example, Vickers et al. (2003) J. Biol. Chem 278:7108-7118 and Yang et al. (2002) Proc. Natl. Acad. Sci. USA 99:9442-9447, herein incorporated by reference. These studies indicate that there is a significant correlation between the RNase-H-sensitive sites and sites that promote efficient siRNA-directed mRNA degradation.

[0077] The hairpin silencing element may also be designed such that the sense or the antisense sequence do not correspond to a target polynucleotide. In this embodiment, the sense and antisense sequence flank a loop sequence that comprises a nucleotide sequence corresponding to all or part of the target polynucleotide. Thus, it is the loop region that determines the specificity of the RNA interference. See, for example, WO 02/00904, herein incorporated by reference.

[0078] In specific embodiments, the silencing element comprising the hairpin comprises a sequence selected from the group consisting of a polynucleotide comprising or consist of at least one of the sequences of the various chemically-regulated transcriptional repressors discussed elsewhere herein, including the various SuR polypeptides, such as those set forth in any of SEQ ID NOs:1-836, 863-870, 884-889, 1381-1568 and/or 2030-2110 or active variants and fragments thereof. In some embodiments, the entire chemically-regulated transcriptional repressor is employed or only a region comprising the DNA binding domain or a variant or fragment thereof or the ligand binding domain or a variant or fragment thereof is employed in hairpin of the silencing element.

[0079] In specific embodiments, the silencing element comprises at least or consists of 15, 20, 22, 25 or greater consecutive nucleotides encoding a chemically-regulated transcriptional repressor discussed elsewhere herein, including the various SuR polypeptides, such as those set forth in any of SEQ ID NOs: 1-836, 863-870, 884-889, 1381-1568 and/or 2030-2110 or active variants and fragments thereof. In other embodiments, the silencing element comprises at least or consists of a polynucleotide encoding amino acids 1-7, 7-14, 14-21, 14-28, 28-35, 35-42, 42-49, 49-56, 56-63, 63-70, 70-77, 77-84, 84-91, 91-98, 98-105, 105-112, 112-119, 119-126, 126-133, 133-140, 140-147, 147-154, 154-161, 161-168, 168-175, 175-182, 182-189, 189-196, 196-203, or 203-207 of a chemically-regulated transcriptional repressors discussed elsewhere herein, including the various SuR polypeptides, such as those set forth in any of SEQ ID NOs:1-836, 863-870, 884-889, 1381-1568 and/or 2030-2110 or active variants and fragments thereof. Alternatively, the silencing element comprises at least or consists of 15, 20, 22, 25 or greater consecutive nucleotides of the 5′ or 3′ translated region of the polynucleotide encoding the chemically-regulated transcriptional repressor or a combination of translated and coding sequences.

[0080] In addition, transcriptional gene silencing (TGS) may be accomplished through use of a hairpin suppression element where the inverted repeat of the hairpin shares sequence identity with the promoter region of a target polynucleotide to be silenced. See, for example, Aufsatz et al. (2002) PNAS 99 (Suppl. 4):16499-16506 and Mette et al. (2000) EMBO J 19(19):5194-5201.

[0081] It is envisioned that a trans-acting siRNA (tasiRNA) or microRNA (miRNA) with targeting sequences to the repressor transcript can be substituted for the hairpin cassettes in the above vectors. Likewise different repressors can be substituted as long as the miRNA is modified to new target. In this case the repressor can be that of TetR, or any of the SuR's. While the hairpin approach would potentially target related repressor sequences in the same plant/plant cell, a miRNA could be made to target one specific repressor type. This would enable auto-induction of multiple gene circuits in an independent fashion.

[0082] The methods and compositions of the invention employ silencing elements that when transcribed “form” a dsRNA molecule. Accordingly, the heterologous polynucleotide being expressed need not form the dsRNA by itself, but can interact with other sequences in the plant cell to allow the formation of the dsRNA. For example, a chimeric polynucleotide that can selectively silence the target polynucleotide can be generated by expressing a chimeric construct comprising the target sequence for a miRNA or siRNA to a sequence corresponding to all or part of the gene or genes to be silenced. In this embodiment, the dsRNA is “formed” when the target for the miRNA or siRNA interacts with the miRNA present in the cell. The resulting dsRNA can then reduce the level of expression of the gene or genes to be silenced. See, for example, U.S. Application Publication 2007-0130653, herein incorporated by reference. As discussed elsewhere herein, any method can be used to introduce the construct comprising the heterologous miRNA.

[0083] (iii) MicroRNA (miRNA) Silencing Element

[0084] In other embodiments, the silencing element can comprise a micro RNA (miRNA). “MicroRNAs” or “miRNAs” are regulatory agents comprising about 19 to about 24 ribonucleotides in length, which are highly efficient at inhibiting the expression of target polynucleotides. See, for example Javier et al. (2003) Nature 425: 257-263, herein incorporated by reference. For miRNA interference, the silencing element can be designed to express a dsRNA molecule that forms a hairpin structure containing a 19, 20, 21, 22, 23, 24 or 25 nucleotide sequence that is complementary to the target polynucleotide of interest. The miRNA can be synthetically made, or transcribed as a longer RNA which is subsequently cleaved to produce the active miRNA. The miRNA can be an “artificial miRNA” or “amiRNA” which comprises a miRNA sequence that is synthetically designed to silence a target sequence.

[0085] When expressing an miRNA, the final (mature) miRNA is present in a duplex in a precursor backbone structure, the two strands being referred to as the miRNA (the strand that will eventually basepair with the target) and miRNA* (star sequence). It has been demonstrated that miRNAs can be transgenically expressed and target genes of interest efficiently silenced (Highly specific gene silencing by artificial microRNAs in Arabidopsis Schwab et al. (2006) Plant Cell. May; 18(5):1121-33; Epub 2006 Mar. 10 & Expression of artificial microRNAs in transgenic Arabidopsis thaliana confers virus resistance. Niu et al. (2006) Nat Biotechnol. 2006 November; 24(11):1420-8. Epub 2006 Oct. 22. Erratum in: Nat Biotechnol. 2007 February; 25(2):254; each of which are herein incorporated by reference.)

[0086] The silencing element for miRNA interference comprises a miRNA precursor backbone. The miRNA precursor backbone comprises a DNA sequence having the miRNA and star sequences. When expressed as an RNA, the structure of the miRNA precursor backbone is such as to allow for the formation of a hairpin RNA structure that can be processed into a miRNA. In some embodiments, the miRNA precursor backbone comprises a genomic miRNA precursor sequence, wherein said sequence comprises a native precursor in which a heterologous (artificial) miRNA and star sequence are inserted.

[0087] As used herein, a “star sequence” is the sequence within a miRNA precursor backbone that is complementary to the miRNA and forms a duplex with the miRNA to form the stem structure of a hairpin RNA. In some embodiments, the star sequence can comprise less than 100% complementarity to the miRNA sequence. Alternatively, the star sequence can comprise at least 99%, 98%, 97%, 96%, 95%, 90%, 85%, 80% or lower sequence complementarity to the miRNA sequence as long as the star sequence has sufficient complementarity to the miRNA sequence to form a double stranded structure. In still further embodiments, the star sequence comprises a sequence having 1, 2, 3, 4, 5 or more mismatches with the miRNA sequence and still has sufficient complementarity to form a double stranded structure with the miRNA sequence resulting in production of miRNA and suppression of the target sequence.

[0088] The miRNA precursor backbones can be from any plant. In some embodiments, the miRNA precursor backbone is from a monocot. In other embodiments, the miRNA precursor backbone is from a dicot. In further embodiments, the backbone is from maize or soybean. MicroRNA precursor backbones have been described previously. For example, US20090155910A1 (WO 2009/079532) discloses the following soybean miRNA precursor backbones: 156c, 159, 166b, 168c, 396b and 398b, and US20090155909A1 (WO 2009/079548) discloses the following maize miRNA precursor backbones: 159c, 164h, 168a, 169r, and 396h. Each of these references is incorporated by reference in their entirety.

[0089] Thus, the miRNA precursor backbone can be altered to allow for efficient insertion of heterologous miRNA and star sequences within the miRNA precursor backbone. In such instances, the miRNA segment and the star segment of the miRNA precursor backbone are replaced with the heterologous miRNA and the heterologous star sequences, designed to target any sequence of interest, using a PCR technique and cloned into an expression construct. It is recognized that there could be alterations to the position at which the artificial miRNA and star sequences are inserted into the backbone. Detailed methods for inserting the miRNA and star sequence into the miRNA precursor backbone are described in, for example, US Patent Applications 20090155909A1 and US20090155910A1, herein incorporated by reference in their entirety.

[0090] When designing a miRNA sequence and star sequence, various design choices can be made. See, for example, Schwab R, et al. (2005) Dev Cell 8: 517-27. In non-limiting embodiments, the miRNA sequences disclosed herein can have a “U” at the 5′-end, a “C” or “G” at the 19^{th} nucleotide position, and an “A” or “U” at the 10th nucleotide position. In other embodiments, the miRNA design is such that the miRNA have a high free delta-G as calculated using the ZipFold algorithm (Markham, N. R. & Zuker, M. (2005) Nucleic Acids Res. 33: W577-W581.) Optionally, a one base pair change can be added within the 5′ portion of the miRNA so that the sequence differs from the target sequence by one nucleotide.

[0091] c. Promoters for Expression of the Silencing Elements

[0092] The polynucleotide encoding the silencing element is operably linked to a repressible promoter active in the plant. Various repressible promoters that can be used to express the silencing element are discussed in detail elsewhere herein.

[0093] 3. Expression Construct Comprising a Polynucleotide of Interest.

[0094] Any polynucleotide of interest can be expressed in the chemical-gene switch disclosed herein. In specific embodiments, expression of the polynucleotide of interest alters the phenotype and/or genotype of the plant. An altered genotype includes any heritable modification to any sequence in a plant genome. An altered phenotype includes any scenario wherein a cell, tissue, plant, and/or seed exhibits a characteristic or trait that distinguishes it from its unaltered state. Altered phenotypes included, but are not limited to, a different growth habit, altered flower color, altered relative maturity, altered yield, altered fertility, altered flowering time, altered disease tolerance, altered insect tolerance, altered herbicide tolerance, altered stress tolerance, altered water tolerance, altered drought tolerance, altered seed characteristics, altered morphology, altered agronomic characteristic, altered metabolism, altered gene expression profile, altered ploidy, altered crop quality, altered forage quality, altered silage quality, altered processing characteristics, and the like.

[0095] Polynucleotides of interest are reflective of the commercial markets and interests of those involved in the development of the crop. Crops and markets of interest change, and as developing nations open up world markets, new crops and technologies will emerge also. In addition, as our understanding of agronomic traits and characteristics such as yield and heterosis increase, the choice of genes for transformation will change accordingly. General categories of genes of interest include, for example, those genes involved in information, such as zinc fingers, those involved in communication, such as kinases, and those involved in housekeeping, such as heat shock proteins. More specific categories of transgenes, for example, include genes encoding important traits for agronomics, insect resistance, disease resistance, herbicide resistance, sterility, grain characteristics, and commercial products. Genes of interest include, generally, those involved in oil, starch, carbohydrate, or nutrient metabolism, as well as, those affecting kernel size, sucrose loading, and the like.

[0096] In still other embodiments, the polynucleotide of interest may be any sequence of interest, including but not limited to sequences encoding a polypeptide, encoding an mRNA, encoding an RNAi precursor, encoding an active RNAi agent, a miRNA, an antisense polynucleotide, a ribozyme, a fusion protein, a replicating vector, a screenable marker, and the like. Expression of the polynucleotide of interest may be used to induce expression of an encoding RNA and/or polypeptide, or conversely to suppress expression of an encoded RNA, RNA target sequence, and/or polypeptide. In specific examples, the polynucleotide sequence may be a polynucleotide encoding a plant hormone, plant defense protein, a nutrient transport protein, a biotic association protein, a desirable input trait, a desirable output trait, a stress resistance gene, a disease/pathogen resistance gene, a male sterility gene, a developmental gene, a regulatory gene, a DNA repair gene, a transcriptional regulatory gene or any other polynucleotide and/or polypeptide of interest.

[0097] Agronomically important traits such as oil, starch, and protein content can be genetically altered in addition to using traditional breeding methods. Modifications include increasing content of oleic acid, saturated and unsaturated oils, increasing levels of lysine and sulfur, providing essential amino acids, and also modification of starch. Hordothionin protein modifications are described in U.S. Pat. Nos. 5,703,049, 5,885,801, 5,885,802, and 5,990,389, herein incorporated by reference. Another example is lysine and/or sulfur rich seed protein encoded by the soybean 2S albumin described in U.S. Pat. No. 5,850,016, and the chymotrypsin inhibitor from barley, described in Williamson et al. (1987) Eur. J. Biochem. 165:99-106, the disclosures of which are herein incorporated by reference.

[0098] Derivatives of the coding sequences can be made by site-directed mutagenesis to increase the level of preselected amino acids in the encoded polypeptide. For example, the gene encoding the barley high lysine polypeptide (BHL) is derived from barley chymotrypsin inhibitor, U.S. application Ser. No. 08/740,682, filed Nov. 1, 1996, and WO 98/20133, the disclosures of which are herein incorporated by reference. Other proteins include methionine-rich plant proteins such as from sunflower seed (Lilley et al. (1989) Proceedings of the World Congress on Vegetable Protein Utilization in Human Foods and Animal Feedstuffs, ed. Applewhite (American Oil Chemists Society, Champaign, Ill.), pp. 497-502; herein incorporated by reference); corn (Pedersen et al. (1986) J. Biol. Chem. 261:6279; Kirihara et al. (1988) Gene 71:359; both of which are herein incorporated by reference); and rice (Musumura et al. (1989) Plant Mol. Biol. 12:123, herein incorporated by reference). Other agronomically important genes encode latex, Floury 2, growth factors, seed storage factors, and transcription factors.

[0099] Insect resistance genes may encode resistance to pests that have great yield drag such as rootworm, cutworm, European Corn Borer, and the like. Such genes include, for example, Bacillus thuringiensis toxic protein genes (U.S. Pat. Nos. 5,366,892; 5,747,450; 5,736,514; 5,723,756; 5,593,881; and Geiser et al. (1986) Gene 48:109); and the like.

[0100] Genes encoding disease resistance traits include detoxification genes, such as against fumonosin (U.S. Pat. No. 5,792,931); avirulence (avr) and disease resistance (R) genes (Jones et al. (1994) Science 266:789; Martin et al. (1993) Science 262:1432; and Mindrinos et al. (1994) Cell 78:1089); and the like.

[0101] Herbicide resistance traits may include genes coding for resistance to herbicides that act to inhibit the action of acetolactate synthase (ALS), in particular the sulfonylurea-type herbicides (e.g., the acetolactate synthase (ALS) gene containing mutations leading to such resistance, in particular the S4 and/or Hra mutations), genes coding for resistance to herbicides that act to inhibit action of glutamine synthase, such as phosphinothricin or basta (e.g., the bar gene); glyphosate (e.g., the EPSPS gene and the GAT gene; see, for example, U.S. Publication No. 20040082770 and WO 03/092360); or other such genes known in the art. The bar gene encodes resistance to the herbicide basta, the nptII gene encodes resistance to the antibiotics kanamycin and geneticin, and the ALS-gene mutants encode resistance to the herbicide chlorsulfuron.

[0102] Sterility genes can also be encoded in an expression cassette and provide an alternative to physical detasseling. Examples of genes used in such ways include male tissue-preferred genes and genes with male sterility phenotypes such as QM, described in U.S. Pat. No. 5,583,210. Other genes include kinases and those encoding compounds toxic to either male or female gametophytic development.

[0103] The quality of grain is reflected in traits such as levels and types of oils, saturated and unsaturated, quality and quantity of essential amino acids, and levels of cellulose. In corn, modified hordothionin proteins are described in U.S. Pat. Nos. 5,703,049, 5,885,801, 5,885,802, and 5,990,389.

[0104] Commercial traits can also be encoded on a gene or genes that could increase for example, starch for ethanol production, or provide expression of proteins. Another important commercial use of transformed plants is the production of polymers and bioplastics such as described in U.S. Pat. No. 5,602,321. Genes such as β-Ketothiolase, PHBase (polyhydroxyburyrate synthase), and acetoacetyl-CoA reductase (see Schubert et al. (1988) J. Bacteriol. 170:5837-5847) facilitate expression of polyhyroxyalkanoates (PHAs).

[0105] Exogenous products include plant enzymes and products as well as those from other sources including prokaryotes and other eukaryotes. Such products include enzymes, cofactors, hormones, and the like. The level of proteins, particularly modified proteins having improved amino acid distribution to improve the nutrient value of the plant, can be increased. This is achieved by the expression of such proteins having enhanced amino acid content.

[0106] a. Promoters for Expression of the Polynucleotide of Interest

[0107] The polynucleotide of interest is operably linked to a repressible promoter active in the plant. Various repressible promoters that can be used to express the silencing element are discussed in detail elsewhere herein.

[0108] 4. Promoters

[0109] As outlined in detail above, a number of promoters can be used in the various constructs of the chemical-gene switch. The promoters can be selected based on the desired outcome. Promoters of interest can be a constitutive promoter or a non-constitutive promoter. Non-constitutive promoter can include, but are not limited to, a tissue preferred promoter, an inducible promoter, a repressible promoter, a developmental stage preferred promoter, or a promoter having more than one of these properties. In some examples the promoter is primarily expressed in roots, leaves, stems, flowers, silks, anthers, pollen, meristem, germline, seed, endosperm, embryos, or progeny. Non-limiting examples of promoters employed within the constructs of the chemical-gene switch are discussed in detail below.

[0110] Constitutive promoters include, for example, the core promoter of the Rsyn7 promoter and other constitutive promoters disclosed in WO 99/43838 and U.S. Pat. No. 6,072,050; the core CaMV 35S promoter (Odell et al. (1985) Nature 313:810-812); rice actin (McElroy et al. (1990) Plant Cell 2:163-171); ubiquitin (Christensen et al. (1989) Plant Mol. Biol. 12:619-632 and Christensen et al. (1992) Plant Mol. Biol. 18:675-689); pEMU (Last et al. (1991) Theor. Appl. Genet. 81:581-588); MAS (Velten et al. (1984) EMBO J. 3:2723-2730); ALS promoter (U.S. Pat. No. 5,659,026), and the like. Other constitutive promoters include, for example, U.S. Pat. Nos. 5,608,149; 5,608,144; 5,604,121; 5,569,597; 5,466,785; 5,399,680; 5,268,463; 5,608,142; and 6,177,611.

[0111] Tissue-preferred promoters can be utilized to target enhanced expression within a particular plant tissue. Tissue-preferred promoters include Yamamoto et al. (1997) Plant J. 12(2):255-265; Kawamata et al. (1997) Plant Cell Physiol. 38(7):792-803; Hansen et al. (1997) Mol. Gen Genet. 254(3):337-343; Russell et al. (1997) Transgenic Res. 6(2):157-168; Rinehart et al. (1996) Plant Physiol. 112(3):1331-1341; Van Camp et al. (1996) Plant Physiol. 112(2):525-535; Canevascini et al. (1996) Plant Physiol. 112(2):513-524; Yamamoto et al. (1994) Plant Cell Physiol. 35(5):773-778; Lam (1994) Results Probl. Cell Differ. 20:181-196; Orozco et al. (1993) Plant Mol Biol. 23(6):1129-1138; Matsuoka et al. (1993) Proc Natl. Acad. Sci. USA 90(20):9586-9590; and Guevara-Garcia et al. (1993) Plant J. 4(3):495-505. Such promoters can be modified, if necessary, for weak expression.

[0112] Leaf-preferred promoters are known in the art. See, for example, Yamamoto et al. (1997) Plant J. 12(2):255-265; Kwon et al. (1994) Plant Physiol. 105:357-67; Yamamoto et al. (1994) Plant Cell Physiol. 35(5):773-778; Gotor et al. (1993) Plant J. 3:509-18; Orozco et al. (1993) Plant Mol. Biol. 23(6):1129-1138; and Matsuoka et al. (1993) Proc. Natl. Acad. Sci. USA 90(20):9586-9590.

[0113] Root-preferred promoters are known and can be selected from the many available from the literature or isolated de novo from various compatible species. See, for example, Hire et al. (1992) Plant Mol. Biol. 20(2):207-218 (soybean root-specific glutamine synthetase gene); Keller and Baumgartner (1991) Plant Cell 3(10):1051-1061 (root-specific control element in the GRP 1.8 gene of French bean); Sanger et al. (1990) Plant Mol. Biol. 14(3):433-443 (root-specific promoter of the mannopine synthase (MAS) gene of Agrobacterium tumefaciens); and Miao et al. (1991) Plant Cell 3(1):11-22 (full-length cDNA clone encoding cytosolic glutamine synthetase (GS), which is expressed in roots and root nodules of soybean). See also Bogusz et al. (1990) Plant Cell 2(7):633-641, where two root-specific promoters isolated from hemoglobin genes from the nitrogen-fixing nonlegume Parasponia andersonii and the related non-nitrogen-fixing nonlegume Trema tomentosa are described. The promoters of these genes were linked to a 3-glucuronidase reporter gene and introduced into both the nonlegume Nicotiana tabacum and the legume Lotus corniculatus, and in both instances root-specific promoter activity was preserved. Leach and Aoyagi (1991) describe their analysis of the promoters of the highly expressed rolC and rolD root-inducing genes of Agrobacterium rhizogenes (see Plant Science (Limerick) 79(1):69-76). They concluded that enhancer and tissue-preferred DNA determinants are dissociated in those promoters. Teeri et al. (1989) used gene fusion to lacZ to show that the Agrobacterium T-DNA gene encoding octopine synthase is especially active in the epidermis of the root tip and that the TR2′ gene is root specific in the intact plant and stimulated by wounding in leaf tissue, an especially desirable combination of characteristics for use with an insecticidal or larvicidal gene (see EMBO J. 8(2):343-350). The TR1′ gene, fused to nptII (neomycin phosphotransferase II) showed similar characteristics. Additional root-preferred promoters include the VfENOD-GRP3 gene promoter (Kuster et al. (1995) Plant Mol. Biol. 29(4):759-772); and rolB promoter (Capana et al. (1994) Plant Mol. Biol. 25(4):681-691. See also U.S. Pat. Nos. 5,837,876; 5,750,386; 5,633,363; 5,459,252; 5,401,836; 5,110,732; and 5,023,179.

[0114] “Seed-preferred” promoters include both “seed-specific” promoters (those promoters active during seed development such as promoters of seed storage proteins) as well as “seed-germinating” promoters (those promoters active during seed germination). See Thompson et al. (1989) BioEssays 10:108, herein incorporated by reference. Such seed-preferred promoters include, but are not limited to, Cim1 (cytokinin-induced message); cZ19B1 (maize 19 kDa zein); milps (myo-inositol-1-phosphate synthase) (see WO 00/11177 and U.S. Pat. No. 6,225,529; herein incorporated by reference). Gamma-zein is an endosperm-specific promoter. Globulin 1 (Glb-1) is a representative embryo-specific promoter. For dicots, seed-specific promoters include, but are not limited to, bean β-phaseolin, napin, β-conglycinin, soybean lectin, cruciferin, and the like. For monocots, seed-specific promoters include, but are not limited to, maize 15 kDa zein, 22 kDa zein, 27 kDa zein, gamma-zein, waxy, shrunken 1, shrunken 2, Globulin 1, etc. See also WO 00/12733, where seed-preferred promoters from end1 and end2 genes are disclosed; herein incorporated by reference.

[0115] Additional exemplary promoters include but are not limited to a 35S CaMV promoter (Odell et al. (1995) Nature 313:810-812), a S-adenosylmethionine synthase promoter (SAMS) (e.g., those disclosed in U.S. Pat. No. 7,217,858 and US2008/0026466), a Mirabilis mosaic virus promoter (e.g., Dey & Maiti (1999) Plant Mol Biol 40:771-782; Dey & Maiti (1999) Transgenics 3:61-70), an elongation factor promoter (e.g., US2008/0313776 and US2009/0133159), a banana streak virus promoter, an actin promoter (e.g., McElroy et al. (1990) Plant Cell 2:163-171), a TobRB7 promoter (e.g., Yamamoto et al. (1991) Plant Cell 3:371), a patatin promoter (e.g., patatin B33, Martin et al. (1997) Plant J 11:53-62), a ribulose 1,5-bisphosphate carboxylase promoter (e.g., rbcS-3A, see, for example Fluhr et al. (1986) Science 232:1106-1112, and Pellingrinischi et al. (1995) Biochem Soc Trans 23:247-250), an ubiquitin promoter (e.g., Christensen et al. (1992) Plant Mol Biol 18:675-689, and Christensen & Quail (1996) Transgen Res 5:213-218), a metallothionin promoter (e.g., US2010/0064390), a Rab17 promoter (e.g., Vilardell et al. (1994) Plant Mol Biol 24:561-569), a conglycinin promoter (e.g., Chamberland et al. (1992) Plant Mol Biol 19:937-949), a plasma membrane intrinsic (PIP) promoter (e.g., Alexandersson et al. (2009) Plant J 61:650-660), a lipid transfer protein (LTP) promoter (e.g., US2009/0158464, US2009/0070893, and US2008/0295201), a gamma zein promoter (e.g., Uead et al. (1994) Mol Cell Biol 14:4350-4359), a gamma kafarin promoter (e.g., Mishra et al. (2008) Mol Biol Rep 35:81-88), a globulin promoter (e.g., Liu et al. (1998) Plant Cell Rep 17:650-655), a legumin promoter (e.g., U.S. Pat. No. 7,211,712), an early endosperm promoter (EEP) (e.g., US2007/0169226 and US2009/0227013), a B22E promoter (e.g., Klemsdal et al. (1991) Mol Gen Genet 228:9-16), an oleosin promoter (e.g., Plant et al. (1994) Plant Mol Biol 25:193-205), an early abundant protein (EAP) promoter (e.g., U.S. Pat. No. 7,321,031), a late embryogenesis abundant (LEA) protein (e.g., Hva1, Straub et al. (1994) Plant Mol Biol 26:617-630; Dhn and WSI18, Xiao & Xue (2001) Plant Cell Rep 20:667-673), In2-2 promoter (De Veylder et al. (1997) Plant Cell Physiol 38:568-577), a glutathione S-transferase (GST) promoter (e.g., WO93/01294), a PR promoter (e.g., Cao et al. (2006) Plant Cell Rep 6:554-560, and Ono et al. (2004) Biosci Biotech Biochem 68:803-807), an ACE1 promoter (e.g., Mett et al. (1993) Proc Natl Acad Sci USA 90:4567-4571), a steroid responsive promoter (e.g., Schena et al. (1991) Proc Natl Acad Sci USA 88:10421-10425, and McNellis et al. (1998) Plant J 14:247-257), an ethanol-inducible promoter (e.g., A1cA, Caddick et al. (1988) Nat Biotechnol 16:177-180), an estradiol-inducible promoter (e.g., Bruce et al. (2000) Plant Cell 12:65-79), an XVE estradiol-inducible promoter (e.g., Zao et al. (2000) Plant J 24: 265-273), a VGE methoxyfenozide-inducible promoter (e.g., Padidam et al. (2003) Transgen Res 12:101-109), or a TGV dexamethasone-inducible promoter (e.g., Bohner et al. (1999) Plant J 19:87-95).

[0116] a. Repressible Promoters

[0117] As used herein, a “repressible promoter” comprises at least one operator sequence to which the chemically-regulated transcriptional repressor polypeptide specifically binds, and thereby controls the transcriptional activity of the promoter. In the absence of a repressor, the repressible promoter is active and will initiate transcription of an operably linked polynucleotide. In the presence of the repressor, the repressor will bind to the operator sequence and represses transcription. Within the context of the chemical-gene switch, the repressor comprises the chemically-regulated transcriptional repressor, and the chemical ligand influences if it can bind or not bind to the operator. Thus, the binding of the repressor to the operator will be influenced by the presence or absence of a chemical ligand, such that the presence of the chemical ligand will block the transcriptional repressor from binding to the operator. A promoter with “repressible promoter activity” will direct expression of an operably linked polynucleotide, wherein its ability to direct transcription depends on the presence or absence of a chemical ligand (i.e., a tetracycline compound, a sulfonylurea compound) and a corresponding chemically-regulated transcriptional repressor protein. Thus, the presence of the operator “regulates” transcription (increase or decreases expression) of the operably linked sequence.

[0118] Any combination of promoters and operators may be employed to form a repressible promoter. Operators of interest include, but are not limited to, the Tet operator sequence is a TetR(A) operator sequence, a TetR(B) operator sequence, a TetR(D) operator sequence, TetR(E) operator sequence, a TetR(H) operator sequence, or an active variant or fragment thereof. Additional operators of interest include, but are not limited to, those that are regulated by the following repressors: tet, lac, trp, phd, arg, LexA, phiCh1 repressor, lambda C1 and Cro repressors, phage X repressor, MetJ, phir1t rro, phi434 C1 and Cro repressors, RafR, gal, ebg, uxuR, exuR, ROS, SinR, PurR, FruR, P22 C2, TetC, AcrR, Betl, Bm3R1, EnvR, QacR, MtrR, TcmR, Ttk, YbiH, YhgD, and mu Ner, or DNA binding domains in Interpro families including but not limited to IPR001647, IPR010982, and IPR011991.

[0119] In one embodiment, the repressible promoter comprises at least one tet operator sequence. Repressors include tet repressors and sulfonylurea-regulated repressors. Binding of a tet repressor to a tet operator is regulated by tetracycline compounds and analogs thereof. Binding of a sulfonylurea-responsive repressor to a tet operator is controlled by sulfonylurea compounds and analogs thereof. The tet operator sequence can be located within 0-30 nucleotides 5′ or 3′ of the TATA box of the repressible promoter, including, for example, within 20, 19, 18, 17, 16, 15, 14, 13, 12, 11, 10, 9, 8, 7, 6, 5, 4, 3, 2, 1, or 0 nt of the TATA box. In other instances, the tet operator sequence may partially overlap with the TATA box sequence. In one non-limiting example, the tet operator sequence is SEQ ID NO:848 or an active variant or fragment thereof.

[0120] Useful tet operator containing promoters include, for example, those known in the art (see, e.g., Padidam (2003) Curr Op Plant Biol 6:169-177; Gatz & Quail (1988) PNAS 85:1394-1397; Ulmasov et al. (1997) Plant Mol Biol 35:417-424; Weinmann et al. (1994) Plant J 5:559-569). One or more tet operator sequences can be added to a promoter in order to produce a tetracycline inducible promoter. See, for example, Weinmann et al. (1994) Plant J 5:559-569; Love et al. (2000) Plant J 21:579-588. In addition, a widely tested tetracycline regulated expression system for plants using the CaMV 35S promoter was developed (Gatz et al. (1992) Plant J 2:397-404) having three tet operators introduced near the TATA box (3XOpT 35S).

[0121] Thus, a repressible promoter comprising at least one, two, three or more operators (including a tet operator, such as that set forth in SEQ ID NO:848 or an active variant or fragment thereof) regulating expression of said repressor can be used. Non-limiting repressible promoters for expression of the chemically-regulated transcriptional repressor, include the repressible promoters set forth in SEQ ID NO:885, 856, 857, 858, 859, or 860 or active variants and fragments thereof.

[0122] Any promoter can be combined with an operator to generate a repressible promoter. In specific embodiments, the promoter is active in plant cells. The promoter can be a constitutive promoter or a non-constitutive promoter. Non-constitutive promoters include tissue-preferred promoter, such as a promoter that is primarily expressed in roots, leaves, stems, flowers, silks, anthers, pollen, meristem, seed, endosperm, or embryos.

[0123] In particular embodiments, the promoter is a plant actin promoter, a banana streak virus promoter (BSV), an MMV promoter, an enhanced MMV promoter (dMMV), a plant P450 promoter, or an elongation factor 1a (EF1A) promoter. Promoters of interest include, for example, a plant actin promoter (SEQ ID NO:849), a banana streak virus promoter (BSV) (SEQ ID NO:850), a mirabilis mosaic virus promoter (MMV) (SEQ ID NO:851), an enhanced MMV promoter (dMMV) (SEQ ID NO:852), a plant P450 promoter (MP1) (SEQ ID NO:853), or an elongation factor 1a (EF1A) promoter (SEQ ID NO:854), or an active variant for fragment thereof.

[0124] The repressible promoter can comprise one or more operator sequences. For example, the repressible promoter can comprises 1, 2, 3, 4, 5 or more operator sequences. In one embodiment, the repressible promoter comprises two tet operator sequences, wherein the 1^{st} tet operator sequence is located within 0-30 nt 5′ of the TATA box and the 2^{nd} tet operator sequence is located within 0-30 nt 3′ of the TATA box. In some examples, the first and/or the second tet operator sequence is located within 20, 19, 18, 17, 16, 15, 14, 13, 12, 11, 10, 9, 8, 7, 6, 5, 4, 3, 2, 1, or 0 nt of the TATA box. In some examples the first and/or the second tet operator sequence may partially overlap with the TATA box sequence. In some examples, the first and/or the second tet operator sequence is SEQ ID NO:848 or an active variant or fragment thereof.

[0125] In other embodiments, the repressible promoter comprises three tet operator sequences, wherein the 1^{st} tet operator sequence is located within 0-30 nt 5′ of the TATA box, and the 2^{nd} tet operator sequence is located within 0-30 nt 3′ of the TATA box, and the 3^{rd} tet operator is located with 0-50 nt of the transcriptional start site (TSS). In some examples, the 1^{st} and/or the 2^{nd} tet operator sequence is located within 20, 19, 18, 17, 16, 15, 14, 13, 12, 11, 10, 9, 8, 7, 6, 5, 4, 3, 2, 1, or 0 nt of the TATA box. In other instances, the 3^{rd} tet operator sequence is located within 50, 45, 40, 35, 30, 25, 20, 19, 18, 17, 16, 15, 14, 13, 12, 11, 10, 9, 8, 7, 6, 5, 4, 3, 2, 1, or 0 nt of the TSS. In some examples, the 3^{rd} tet operator is located 5′ of the TSS, or the 3^{rd} tet operator sequence may partially overlap with the TSS sequence. In one non-limiting embodiment, the 1^{st}, 2^{nd} and/or the 3^{rd} tet operator sequence is SEQ ID NO:848 or active variant or fragment thereof.

[0126] In another embodiment the repressible promoter may have a single operator site located proximal to the transcription start site. The 35S promoter can be repressed by having an operator sequence located just downstream of the TSS (Heins et al. (1992) Mol Gen Genet 232:328-331.

[0127] In specific examples, the repressible promoter is a plant actin promoter (actin/Op) (SEQ ID NO:855), a banana streak virus promoter (BSV/Op) (SEQ ID NO:856), a mirabilis mosaic virus promoter (MMV/Op) (SEQ ID NO:857), an enhanced MMV promoter (dMMV/Op) (SEQ ID NO:858), a plant P450 promoter (MP1/Op) (SEQ ID NO:859), or an elongation factor 1a (EF1A/Op) promoter (SEQ ID NO:860) or an active variant or fragment thereof. Thus, the repressible promoter can comprise a polynucleotide sequence having at least about 50%, 60%, 65%, 66%, 67%, 68%, 69%, 70%, 71%, 72%, 73%, 74%, 75%, 76%, 77%, 78%, 79%, 80%, 81%, 82%, 83%, 84%, 85%, 86%, 87%, 88%, 89%, 90%, 91%, 92%, 93%, 94%, 95%, 96%, 97%, 98% or 99% sequence identity to SEQ ID NO:885, 856, 857, 858, 859, or 860, wherein the promoter retains repressible promoter activity. In a specific example, the promoter comprises a polynucleotide sequence having at least 95% sequence identity to SEQ ID NO:885, 856, 857, 858, 859, or 860, wherein the promoter retains repressible promoter activity.

[0128] In some embodiments, the repressible promoter employed in the chemical-gene switch is expressed in various tissues or cells, restricted to selected tissue or cell type, restricted to specific developmental stage(s), restricted to specific environmental conditions, and/or restricted to specific generation of a plant or progeny thereof. In some examples, the polynucleotide of interest operably linked to a repressible promoter that, when un-repressed, expresses primarily expressed in roots, leaves, stems, flowers, silks, anthers, pollen, meristem, germline, seed, endosperm, embryos, or progeny. In some examples, expression of the polynucleotide of interest operably linked to the repressible promoter results in expression occurring primarily at specific times, which include but are not limited to seed or plant developmental stages, vegetative growth, reproductive cycle, response to environmental conditions, response to pest or pathogen presence, response to chemical compounds, or any combination thereof. In other embodiments, expression of the polynucleotide of interest is reduced, inhibited, or blocked in various tissues or cells, which may be restricted to selected tissue or cell type, restricted to specific developmental stage(s), restricted to specific environmental conditions, and/or restricted to specific generation of a plant or progeny thereof. In some examples expression of the polynucleotide of interest is primarily inhibited in roots, leaves, stems, flowers, silks, anthers, pollen, meristem, germline, seed, endosperm, embryos, or progeny. In some examples expression of the polynucleotide of interest occurs primarily inhibited at specific times, which include but are not limited to seed or plant developmental stages, vegetative growth, reproductive cycle, response to environmental conditions, response to pest or pathogen presence, response to chemical compounds, or any combination thereof.

[0129] 5. Sequence that Confers Tolerance to Chemical Ligand

[0130] As discussed in detail above, a variety of chemical ligands and their corresponding chemically-regulated transcriptional repressors can be used in the methods and compositions disclosed herein to assemble the gene switch. It is recognized that the plant or plant part when exposed to the chemical ligand should remain tolerant to the chemical ligand employed. As used herein, “chemical ligand-tolerant” or “tolerant” or “crop tolerance” or “herbicide-tolerant” or “sulfonylurea-tolerant” in the context of chemical-ligand treatment is intended that a plant treated with the chemical ligand of the particular chemical-gene switch system being employed will show no significant damage following the treatment in comparison to a plant or plant part not exposed the chemical ligand. The chemical ligand employed may be a compound which causes no negative effects on the plant. Alternatively, a plant may be naturally tolerant to a particular chemical ligand, or a plant may be tolerant to the chemical ligand as a result of human intervention such as, for example, by the use of a recombinant construct, plant breeding or genetic engineering.

[0131] In one embodiment, the chemical-gene switch comprises a chemically-regulated transcriptional repressor comprising a Su(R) polypeptide and the chemical ligand comprises a sulfonylurea compound. When such a chemical-gene switch is employed, the plant containing the chemical-gene switch components should have tolerance to the sulfonylurea compound employed as the chemical ligand. The plants employed with such a chemical-gene switch system can comprise a native or a heterologous sequence that confers tolerance to the sulfonylurea compound.

[0132] In one embodiment, the plant comprises a sulfonylurea-tolerant polypeptide. As used herein, a “sulfonylurea-tolerant polypeptide” comprises any polypeptide which when expressed in a plant confers tolerance to at least one sulfonylurea. Sulfonylurea herbicides inhibit growth of higher plants by blocking acetolactate synthase (ALS), also known as, acetohydroxy acid synthase (AHAS). Plants containing particular mutations in ALS (e.g., the S4 and/or HRA mutations) are tolerant to sulfonylurea herbicides. The production of sulfonylurea-tolerant plants is described more fully in U.S. Pat. Nos. 5,605,011; 5,013,659; 5,141,870; 5,767,361; 5,731,180; 5,304,732; 4,761,373; 5,331,107; 5,928,937; and 5,378,824; and international publication WO 96/33270, which are incorporated herein by reference in their entireties for all purposes. The sulfonylurea-tolerant polypeptide can be encoded by, for example, the SuRA or SuRB locus of ALS. In specific embodiments, the ALS inhibitor-tolerant polypeptide comprises the C3 ALS mutant, the HRA ALS mutant, the S4 mutant or the S4/HRA mutant or any combination thereof. Different mutations in ALS are known to confer tolerance to different herbicides and groups (and/or subgroups) of herbicides; see, e.g., Tranel and Wright (2002) Weed Science 50:700-712. See also, U.S. Pat. Nos. 5,605,011, 5,378,824, 5,141,870, and 5,013,659, each of which is herein incorporated by reference in their entirety. The HRA mutation in ALS finds particular use in one embodiment. The mutation results in the production of an acetolactate synthase polypeptide which is resistant to at least one sulfonylurea compound in comparison to the wild-type protein.

[0133] A chemical ligand does not “significantly damage” a plant when it either has no effect on a plant or when it has some effect on a plant from which the plant later recovers, or when it has an effect which is detrimental but which is offset, for example, by the impact of the particular herbicide on weeds or the desired phenotype produced by the chemical-gene switch system. Thus, for example, a plant is not “significantly damaged by” a chemical ligand treatment if it exhibits less than 50%, 40%, 30%, 25%, 20%, 15%, 10%, 9%, 8%, 7%, 6%, 5%, 4%, 3%, 2%, or 1% decrease in at least one suitable parameter that is indicative of plant health and/or productivity in comparison to an appropriate control plant (e.g., an untreated crop plant). Suitable parameters that are indicative of plant health and/or productivity include, for example, plant height, plant weight, leaf length, time elapsed to a particular stage of development, flowering, yield, seed production, and the like. The evaluation of a parameter can be by visual inspection and/or by statistical analysis of any suitable parameter. Comparison may be made by visual inspection and/or by statistical analysis. Accordingly, a crop plant is not “significantly damaged by” a herbicide or other treatment if it exhibits a decrease in at least one parameter but that decrease is temporary in nature and the plant recovers fully within 1 week, 2 weeks, 3 weeks, 4 weeks, or 6 weeks.

### III. Plants

[0134] Plants, plant cells, plant parts and seeds, and grain having one or more of the chemical-gene switch components (i.e., the silencing element construct, the polynucleotide sequence of interest construct, and/or the chemically-regulated transcriptional repressor construct) are provided. In specific embodiments, the plants and/or plant parts have stably incorporated at least one of the chemical-gene switch components (i.e., the silencing element construct, the polynucleotide sequence of interest construct, and/or the chemically-regulated transcriptional repressor construct).

[0135] As used herein, the term plant includes plant cells, plant protoplasts, plant cell tissue cultures from which plants can be regenerated, plant calli, plant clumps, and plant cells that are intact in plants or parts of plants such as embryos, pollen, ovules, seeds, leaves, flowers, branches, fruit, kernels, ears, cobs, husks, stalks, roots, root tips, anthers, and the like. Grain is intended to mean the mature seed produced by commercial growers for purposes other than growing or reproducing the species. Progeny, variants, and mutants of the regenerated plants are also included within the scope of the invention, provided that these parts comprise the introduced polynucleotides.

[0136] One or more of the chemical-gene switch components (i.e., the silencing element construct, the polynucleotide sequence of interest construct, and the chemically-regulated transcriptional repressor construct) may be used for transformation of any plant species, including, but not limited to, monocots and dicots. Examples of plant species of interest include, but are not limited to, corn (Zea mays), Brassica sp. (e.g., B. napus, B. rapa, B. juncea), particularly those Brassica species useful as sources of seed oil, alfalfa (Medicago sativa), rice (Oryza sativa), rye (Secale cereale), sorghum (Sorghum bicolor, Sorghum vulgare), millet (e.g., pearl millet (Pennisetum glaucum), proso millet (Panicum miliaceum), foxtail millet (Setaria italica), finger millet (Eleusine coracana)), sunflower (Helianthus annuus), safflower (Carthamus tinctorius), wheat (Triticum aestivum), soybean (Glycine max), tobacco (Nicotiana tabacum), potato (Solanum tuberosum), peanuts (Arachis hypogaea), cotton (Gossypium barbadense, Gossypium hirsutum), sweet potato (Ipomoea batatus), cassava (Manihot esculenta), coffee (Coffea spp.), coconut (Cocos nucifera), pineapple (Ananas comosus), citrus trees (Citrus spp.), cocoa (Theobroma cacao), tea (Camellia sinensis), banana (Musa spp.), avocado (Persea americana), fig (Ficus casica), guava (Psidium guajava), mango (Mangifera indica), olive (Olea europaea), papaya (Carica papaya), cashew (Anacardium occidentale), macadamia (Macadamia integrifolia), almond (Prunus amygdalus), sugar beets (Beta vulgaris), sugarcane (Saccharum spp.), oats, barley, vegetables, ornamentals, and conifers.

[0137] Vegetables include tomatoes (Lycopersicon esculentum), lettuce (e.g., Lactuca sativa), green beans (Phaseolus vulgaris), lima beans (Phaseolus limensis), peas (Lathyrus spp.), and members of the genus Cucumis such as cucumber (C. sativus), cantaloupe (C. cantalupensis), and musk melon (C. melo). Ornamentals include azalea (Rhododendron spp.), hydrangea (Macrophylla hydrangea), hibiscus (Hibiscus rosasanensis), roses (Rosa spp.), tulips (Tulipa spp.), daffodils (Narcissus spp.), petunias (Petunia hybrida), carnation (Dianthus caryophyllus), poinsettia (Euphorbia pulcherrima), and chrysanthemum.

[0138] Conifers that may be employed in practicing the present invention include, for example, pines such as loblolly pine (Pinus taeda), slash pine (Pinus elliotii), ponderosa pine (Pinus ponderosa), lodgepole pine (Pinus contorta), and Monterey pine (Pinus radiata); Douglas-fir (Pseudotsuga menziesii); Western hemlock (Tsuga canadensis); Sitka spruce (Picea glauca); redwood (Sequoia sempervirens); true firs such as silver fir (Abies amabilis) and balsam fir (Abies balsamea); and cedars such as Western red cedar (Thuja plicata) and Alaska yellow-cedar (Chamaecyparis nootkatensis), and Poplar and Eucalyptus. In specific embodiments, plants of the present invention are crop plants (for example, corn, alfalfa, sunflower, Brassica, soybean, cotton, safflower, peanut, sorghum, wheat, millet, tobacco, etc.). In other embodiments, corn and soybean plants are optimal, and in yet other embodiments corn plants are optimal.

[0139] Other plants of interest include grain plants that provide seeds of interest, oil-seed plants, and leguminous plants. Seeds of interest include grain seeds, such as corn, wheat, barley, rice, sorghum, rye, etc. Oil-seed plants include cotton, soybean, safflower, sunflower, Brassica, maize, alfalfa, palm, coconut, etc. Leguminous plants include beans and peas. Beans include guar, locust bean, fenugreek, soybean, garden beans, cowpea, mungbean, lima bean, fava bean, lentils, chickpea, etc.

[0140] A “subject plant or plant cell” is one in which genetic alteration, such as transformation, has been affected as to a gene of interest, or is a plant or plant cell which is descended from a plant or cell so altered and which comprises the alteration. A “control” or “control plant” or “control plant cell” provides a reference point for measuring changes in phenotype of the subject plant or plant cell.

[0141] A control plant or plant cell may comprise, for example: (a) a wild-type plant or cell, i.e., of the same genotype as the starting material for the genetic alteration which resulted in the subject plant or cell; (b) a plant or plant cell of the same genotype as the starting material but which has been transformed with a null construct (i.e. with a construct which has no known effect on the trait of interest, such as a construct comprising a marker gene); (c) a plant or plant cell which is a non-transformed segregant among progeny of a subject plant or plant cell; (d) a plant or plant cell genetically identical to the subject plant or plant cell but which is not exposed to conditions or stimuli that would induce expression of the gene of interest and/or the silencing element; (e) the subject plant or plant cell itself, under conditions in which the gene of interest is not expressed.

[0142] As outlined above, plants and plant parts having the chemical-gene switch can further display tolerance to the chemical ligand. The tolerance to the chemical ligand can be naturally occurring or can be generated by human intervention via breeding or the introduction of recombination sequences that confer tolerance to the chemical ligand. Thus, in some instances the plants comprising the chemical-gene switch comprise sequence that confer tolerant to an SU herbicide, including for example altered forms of AHAS, including the HRA sequence.

### IV. Polynucleotide Constructs

[0143] The use of the term “polynucleotide” is not intended to limit the methods and compositions to polynucleotides comprising DNA. Those of ordinary skill in the art will recognize that polynucleotides can comprise ribonucleotides and combinations of ribonucleotides and deoxyribonucleotides. Such deoxyribonucleotides and ribonucleotides include both naturally occurring molecules and synthetic analogues. The polynucleotides of the invention also encompass all forms of sequences including, but not limited to, single-stranded forms, double-stranded forms, hairpins, stem-and-loop structures, and the like.

[0144] The various comments of the chemical-gene switch system (i.e., the chemically-regulated transcriptional repressor, the silencing element and the polynucleotide of interest and, if needed, the polynucleotide conferring tolerance to the chemical ligand) can be provided in expression cassettes for expression in the plant of interest. The cassette can include 5′ and 3′ regulatory sequences operably linked to the chemically-regulated transcriptional repressor, the silencing element and the polynucleotide of interest. “Operably linked” is intended to mean a functional linkage between two or more elements. For example, an operable linkage between a polynucleotide of interest and a regulatory sequence (i.e., a promoter) is a functional link that allows for expression of the polynucleotide of interest. Operably linked elements may be contiguous or non-contiguous. When used to refer to the joining of two protein coding regions, by operably linked is intended that the coding regions are in the same reading frame. The cassette may additionally contain at least one additional gene to be cotransformed into the organism. Alternatively, the additional gene(s) can be provided on multiple expression cassettes. Such an expression cassette is provided with a plurality of restriction sites and/or recombination sites for insertion of the polynucleotide (i.e., the chemically-regulated transcriptional repressor, the silencing element and the polynucleotide of interest) to be under the transcriptional regulation of the regulatory regions. The expression cassette may additionally contain selectable marker genes.

[0145] The expression cassette can include in the 5′-3′ direction of transcription, a transcriptional and translational initiation region (i.e., a promoter), a component of the chemical-gene switch (i.e., the chemically-regulated transcriptional repressor, the silencing element and the polynucleotide of interest), and a transcriptional and translational termination region (i.e., termination region) functional in plants. The regulatory regions (i.e., promoters, transcriptional regulatory regions, and translational termination regions) and/or the chemically-regulated transcriptional repressor, the silencing element and the polynucleotide of interest may be native/analogous to the host cell or to each other. Alternatively, the regulatory regions may be heterologous to the host cell or to each other.

[0146] As used herein, “heterologous” in reference to a sequence is a sequence that originates from a foreign species, or, if from the same species, is substantially modified from its native form in composition and/or genomic locus by deliberate human intervention. For example, a promoter operably linked to a heterologous polynucleotide is from a species different from the species from which the polynucleotide was derived, or, if from the same/analogous species, one or both are substantially modified from their original form and/or genomic locus, or the promoter is not the native promoter for the operably linked polynucleotide.

[0147] The termination region may be native with the transcriptional initiation region, may be native with the plant host, or may be derived from another source (i.e., foreign or heterologous) to the promoter, the plant host, or any combination thereof. Convenient termination regions are available from the Ti-plasmid of A. tumefaciens, such as the octopine synthase and nopaline synthase termination regions. See also Guerineau et al. (1991) Mol. Gen. Genet. 262:141-144; Proudfoot (1991) Cell 64:671-674; Sanfacon et al. (1991) Genes Dev. 5:141-149; Mogen et al. (1990) Plant Cell 2:1261-1272; Munroe et al. (1990) Gene 91:151-158; Ballas et al. (1989) Nucleic Acids Res. 17:7891-7903; and Joshi et al. (1987) Nucleic Acids Res. 15:9627-9639.

[0148] Where appropriate, the polynucleotides of the chemical-gene switch system (i.e., the chemically-regulated transcriptional repressor, the silencing element and the polynucleotide of interest) may be optimized for increased expression in the transformed plant. That is, the polynucleotides can be synthesized using plant-preferred codons for improved expression. See, for example, Campbell and Gowri (1990) Plant Physiol. 92:1-11 for a discussion of host-preferred codon usage. Methods are available in the art for synthesizing plant-preferred genes. See, for example, U.S. Pat. Nos. 5,380,831, and 5,436,391, and Murray et al. (1989) Nucleic Acids Res. 17:477-498, herein incorporated by reference.

[0149] Additional sequence modifications are known to enhance gene expression in a cellular host. These include elimination of sequences encoding spurious polyadenylation signals, exon-intron splice site signals, transposon-like repeats, and other such well-characterized sequences that may be deleterious to gene expression. The G-C content of the sequence may be adjusted to levels average for a given cellular host, as calculated by reference to known genes expressed in the host cell. When possible, the sequence is modified to avoid predicted hairpin secondary mRNA structures.

[0150] The expression cassettes may additionally contain 5′ leader sequences. Such leader sequences can act to enhance translation. Translation leaders are known in the art and include: picornavirus leaders, for example, EMCV leader (Encephalomyocarditis 5′ noncoding region) (Elroy-Stein et al. (1989) Proc. Natl. Acad. Sci. USA 86:6126-6130); potyvirus leaders, for example, TEV leader (Tobacco Etch Virus) (Gallie et al. (1995) Gene 165(2):233-238), MDMV leader (Maize Dwarf Mosaic Virus) (Virology 154:9-20), and human immunoglobulin heavy-chain binding protein (BiP) (Macejak et al. (1991) Nature 353:90-94); untranslated leader from the coat protein mRNA of alfalfa mosaic virus (AMV RNA 4) (Jobling et al. (1987) Nature 325:622-625); tobacco mosaic virus leader (TMV) (Gallie et al. (1989) in Molecular Biology of RNA, ed. Cech (Liss, New York), pp. 237-256); and maize chlorotic mottle virus leader (MCMV) (Lommel et al. (1991) Virology 81:382-385. See also, Della-Cioppa et al. (1987) Plant Physiol. 84:965-968.

[0151] In preparing the expression cassette, the various DNA fragments may be manipulated, so as to provide for the DNA sequences in the proper orientation and, as appropriate, in the proper reading frame. Toward this end, adapters or linkers may be employed to join the DNA fragments or other manipulations may be involved to provide for convenient restriction sites, removal of superfluous DNA, removal of restriction sites, or the like. For this purpose, in vitro mutagenesis, primer repair, restriction, annealing, resubstitutions, e.g., transitions and transversions, may be involved.

[0152] As discussed in detail elsewhere herein, a number of promoters can be used to express the various components of the chemical-gene switch system. The promoters can be selected based on the desired outcome.

[0153] The expression cassette(s) can also comprise a selectable marker gene for the selection of transformed cells. Selectable marker genes are utilized for the selection of transformed cells or tissues. Marker genes include genes encoding antibiotic resistance, such as those encoding neomycin phosphotransferase II (NEO) and hygromycin phosphotransferase (HPT), as well as genes conferring resistance to herbicidal compounds, such as glyphosate, glufosinate ammonium, bromoxynil, sulfonylureas, dicamba, and 2,4-dichlorophenoxyacetate (2,4-D). Additional selectable markers include phenotypic markers such as β-galactosidase and fluorescent proteins such as green fluorescent protein (GFP) (Su et al. (2004) Biotechnol Bioeng 85:610-9 and Fetter et al. (2004) Plant Cell 16:215-28), cyan florescent protein (CYP) (Bolte et al. (2004) J. Cell Science 117:943-54 and Kato et al. (2002) Plant Physiol 129:913-42), and yellow florescent protein (PhiYFP™ from Evrogen, see, Bolte et al. (2004) J. Cell Science 117:943-54). For additional selectable markers, see generally, Yarranton (1992) Curr. Opin. Biotech. 3:506-511; Christopherson et al. (1992) Proc. Natl. Acad. Sci. USA 89:6314-6318; Yao et al. (1992) Cell 71:63-72; Reznikoff (1992) Mol. Microbiol. 6:2419-2422; Barkley et al. (1980) in The Operon, pp. 177-220; Hu et al. (1987) Cell 48:555-566; Brown et al. (1987) Cell 49:603-612; Figge et al. (1988) Cell 52:713-722; Deuschle et al. (1989) Proc. Natl. Acad. Aci. USA 86:5400-5404; Fuerst et al. (1989) Proc. Natl. Acad. Sci. USA 86:2549-2553; Deuschle et al. (1990) Science 248:480-483; Gossen (1993) Ph.D. Thesis, University of Heidelberg; Reines et al. (1993) Proc. Natl. Acad. Sci. USA 90:1917-1921; Labow et al. (1990) Mol. Cell. Biol. 10:3343-3356; Zambretti et al. (1992) Proc. Natl. Acad. Sci. USA 89:3952-3956; Baim et al. (1991) Proc. Natl. Acad. Sci. USA 88:5072-5076; Wyborski et al. (1991) Nucleic Acids Res. 19:4647-4653; Hillenand-Wissman (1989) Topics Mol. Struc. Biol. 10:143-162; Degenkolb et al. (1991) Antimicrob. Agents Chemother. 35:1591-1595; Kleinschnidt et al. (1988) Biochemistry 27:1094-1104; Bonin (1993) Ph.D. Thesis, University of Heidelberg; Gossen et al. (1992) Proc. Natl. Acad. Sci. USA 89:5547-5551; Oliva et al. (1992) Antimicrob. Agents Chemother. 36:913-919; Hlavka et al. (1985) Handbook of Experimental Pharmacology, Vol. 78 (Springer-Verlag, Berlin); Gill et al. (1988) Nature 334:721-724. Such disclosures are herein incorporated by reference. The above list of selectable marker genes is not meant to be limiting.

[0154] The various components can be introduced into a plant on a single polynucleotide construct or single plasmid or on separate polynucleotide constructs or on separate plasmids. It is further recognized the various components of the gene-switch can be brought together through any means including the introduction of one or more component into a plant and then breeding the individual components together into a single plant.

### V. Methods of Introducing

[0155] Various methods can be used to introduce the various components of the chemical-gene switch system in a plant or plant part. “Introducing” is intended to mean presenting to the plant, plant cell or plant part the polynucleotide or polypeptide in such a manner that the sequence gains access to the interior of a cell of the plant. The methods of the invention do not depend on a particular method for introducing a sequence into a plant or plant part, only that the polynucleotide or polypeptides gains access to the interior of at least one cell of the plant. Methods for introducing polynucleotide or polypeptides into plants are known in the art including, but not limited to, stable transformation methods, transient transformation methods, and virus-mediated methods.

[0156] “Stable transformation” is intended to mean that the nucleotide construct introduced into a plant integrates into the genome of the plant and is capable of being inherited by the progeny thereof “Transient transformation” is intended to mean that a polynucleotide is introduced into the plant and does not integrate into the genome of the plant or a polypeptide is introduced into a plant.

[0157] Transformation protocols as well as protocols for introducing polypeptides or polynucleotide sequences into plants may vary depending on the type of plant or plant cell, i.e., monocot or dicot, targeted for transformation. Suitable methods of introducing polypeptides and polynucleotides into plant cells include microinjection (Crossway et al. (1986) Biotechniques 4:320-334), electroporation (Riggs et al. (1986) Proc. Natl. Acad. Sci. USA 83:5602-5606, Agrobacterium-mediated transformation (U.S. Pat. No. 5,563,055 and U.S. Pat. No. 5,981,840), direct gene transfer (Paszkowski et al. (1984) EMBO J. 3:2717-2722), and ballistic particle acceleration (see, for example, U.S. Pat. No. 4,945,050; U.S. Pat. No. 5,879,918; U.S. Pat. Nos. 5,886,244; and, 5,932,782; Tomes et al. (1995) in Plant Cell, Tissue, and Organ Culture: Fundamental Methods, ed. Gamborg and Phillips (Springer-Verlag, Berlin); McCabe et al. (1988) Biotechnology 6:923-926); and Lec1 transformation (WO 00/28058). Also see Weissinger et al. (1988) Ann. Rev. Genet. 22:421-477; Sanford et al. (1987) Particulate Science and Technology 5:27-37 (onion); Christou et al. (1988) Plant Physiol. 87:671-674 (soybean); McCabe et al. (1988) Bio/Technology 6:923-926 (soybean); Finer and McMullen (1991) In Vitro Cell Dev. Biol. 27P:175-182 (soybean); Singh et al. (1998) Theor. Appl. Genet. 96:319-324 (soybean); Datta et al. (1990) Biotechnology 8:736-740 (rice); Klein et al. (1988) Proc. Natl. Acad. Sci. USA 85:4305-4309 (maize); Klein et al. (1988) Biotechnology 6:559-563 (maize); U.S. Pat. Nos. 5,240,855; 5,322,783; and, 5,324,646; Klein et al. (1988) Plant Physiol. 91:440-444 (maize); Fromm et al. (1990) Biotechnology 8:833-839 (maize); Hooykaas-Van Slogteren et al. (1984) Nature (London) 311:763-764; U.S. Pat. No. 5,736,369 (cereals); Bytebier et al. (1987) Proc. Natl. Acad. Sci. USA 84:5345-5349 (Liliaceae); De Wet et al. (1985) in The Experimental Manipulation of Ovule Tissues, ed. Chapman et al. (Longman, N.Y.), pp. 197-209 (pollen); Kaeppler et al. (1990) Plant Cell Reports 9:415-418 and Kaeppler et al. (1992) Theor. Appl. Genet. 84:560-566 (whisker-mediated transformation); D'Halluin et al. (1992) Plant Cell 4:1495-1505 (electroporation); Li et al. (1993) Plant Cell Reports 12:250-255 and Christou and Ford (1995) Annals of Botany 75:407-413 (rice); Osjoda et al. (1996) Nature Biotechnology 14:745-750 (maize via Agrobacterium tumefaciens); all of which are herein incorporated by reference.

[0158] In other embodiments, the various components of the chemical-gene switch system may be introduced into plants by contacting plants with a virus or viral nucleic acids. Generally, such methods involve incorporating a nucleotide construct of the invention within a DNA or RNA molecule. Methods for introducing polynucleotides into plants and expressing the same, involving viral DNA or RNA molecules, are known in the art. See, for example, U.S. Pat. Nos. 5,889,191, 5,889,190, 5,866,785, 5,589,367, 5,316,931, and Porta et al. (1996) Molecular Biotechnology 5:209-221; herein incorporated by reference.

[0159] Methods are known in the art for the targeted insertion of a polynucleotide at a specific location in the plant genome. In one embodiment, the insertion of one or more of the components of the chemical-gene switch system is achieved using a site-specific recombination system. See, for example, WO99/25821, WO99/25854, WO99/25840, WO99/25855, and WO99/25853, all of which are herein incorporated by reference. Other methods to target polynucleotides are set forth in WO 2009/114321 (herein incorporated by reference), which describes “custom” meganucleases produced to modify plant genomes, in particular the genome of maize. See, also, Gao et al. (2010) Plant Journal 1:176-187.

[0160] The cells that have been transformed may be grown into plants in accordance with conventional ways. See, for example, McCormick et al. (1986) Plant Cell Reports 5:81-84. These plants may then be grown, and either pollinated with the same transformed strain or different strains, and the resulting progeny having constitutive expression of the desired phenotypic characteristic identified. Two or more generations may be grown to ensure that expression of the desired phenotypic characteristic is stably maintained and inherited and then seeds harvested to ensure expression of the desired phenotypic characteristic has been achieved. In this manner, the present invention provides transformed seed (also referred to as “transgenic seed”) having one or more of the components of the chemical-gene switch system or all of the components of the chemical-gene switch system, for example, stably incorporated into their genome.

[0161] In some examples, the components of the chemical-gene switch system can be introduced into a plastid, either by transformation of the plastid or by directing a SuR transcript or polypeptide into the plastid. Any method of transformation, nuclear or plastid, can be used, depending on the desired product and/or use. Plastid transformation provides advantages including high transgene expression, control of transgene expression, ability to express polycistronic messages, site-specific integration via homologous recombination, absence of transgene silencing and position effects, control of transgene transmission via uniparental plastid gene inheritance and sequestration of expressed polypeptides in the organelle which can obviate possible adverse impacts on cytoplasmic components (e.g., see, reviews including Heifetz (2000) Biochimie 82:655-666; Daniell et al. (2002) Trends Plant Sci 7:84-91; Maliga (2002) Curr Op Plant Biol 5:164-172; Maliga (2004) Ann Rev Plant Biol 55-289-313; Daniell et al. (2005) Trends Biotechnol 23:238-245 and Verma and Daniell (2007) Plant Physiol 145:1129-1143).

[0162] Methods and compositions of plastid transformation are well known, for example, transformation methods include (Boynton et al. (1988) Science 240:1534-1538; Svab et al. (1990) Proc Natl Acad Sci USA 87:8526-8530; Svab et al. (1990) Plant Mol Biol 14:197-205; Svab et al. (1993) Proc Natl Acad Sci USA 90:913-917; Golds et al. (1993) Bio/Technology 11:95-97; O'Neill et al. (1993) Plant J 3:729-738; Koop et al. (1996) Planta 199:193-201; Kofer et al. (1998) In Vitro Plant 34:303-309; Knoblauch et al. (1999) Nat Biotechnol 17:906-909); as well as plastid transformation vectors, elements, and selection (Newman et al. (1990) Genetics 126:875-888; Goldschmidt-Clermont, (1991) Nucl Acids Res 19:4083-4089; Caner et al. (1993) Mol Gen Genet 241:49-56; Svab et al. (1993) Proc Natl Acad Sci USA 90:913-917; Verma and Daniell (2007) Plant Physiol 145:1129-1143).

[0163] Methods and compositions for controlling gene expression in plastids are well known including (McBride et al. (1994) Proc Natl Acad Sci USA 91:7301-7305; Lössl et al. (2005) Plant Cell Physiol 46:1462-1471; Heifetz (2000) Biochemie 82:655-666; Surzycki et al. (2007) Proc Natl Acad Sci USA 104:17548-17553; U.S. Pat. Nos. 5,576,198 and 5,925,806; WO 2005/0544478), as well as methods and compositions to import polynucleotides and/or polypeptides into a plastid, including translational fusion to a transit peptide (e.g., Comai et al. (1988) J Biol Chem 263:15104-15109).

[0164] The SuR polynucleotides and polypeptides provide a means for regulating plastid gene expression via a chemical ligand that readily enters the cell. For example, using the T7 expression system for chloroplasts (McBride et al. (1994) Proc Natl Acad Sci USA 91:7301-7305) the SuR could be used to control nuclear expression of plastid targeted T7 polymerase. Alternatively, a SuR-regulated promoter could be integrated into the plastid genome and operably linked to the polynucleotide(s) of interest and the SuR expressed and imported from the nuclear genome, or integrated into the plastid. In all cases, application of a sulfonylurea compound is used to efficiently regulate the polynucleotide(s) of interest and the silencing element.

### VI. Methods of Using the Chemical-Gene Switch System

[0165] Methods to regulate expression in a plant, plant organ or plant tissue are provided. The methods comprise providing a plant comprising (i) a first polynucleotide construct comprising a polynucleotide encoding a chemically-regulated transcriptional repressor operably linked to a promoter active in the plant, (ii) a second polynucleotide construct comprising a polynucleotide of interest operably linked to a first repressible promoter, and (iii) a third polynucleotide construct comprising a gene silencing construct operably linked to a second repressible promoter, wherein the gene silencing construct encodes a silencing element that decreases the level of the chemically-regulated transcriptional repressor. In specific embodiments, silencing element is a non-autonomous silencing element. The first and second repressible promoters each comprise at least one operator, wherein the chemically-regulated transcriptional repressor can bind to each of the operators in the absence of a chemical ligand and thereby repress transcription from the first and the second repressible promoters in the absence of the chemical ligand, and wherein the plant is tolerant to the chemical ligand. The plant is then contacted with an effective amount of the chemical ligand whereby the effective amount of the chemical ligand results in (i) an increase in expression of the polynucleotide of interest and the silencing construct and (ii) a decrease in the level of the chemically-regulated transcriptional repressor. In non-limiting embodiments, the method employs a repressible promoter comprising at least one tetracycline operator in combination with a TetR polypeptide and a ligand comprising a tetracycline compound or an active derivative thereof. In other embodiments, the method employs a repressible promoter comprising at least one tetracycline operator sequence in combination with a SuR polypeptide having a tet operator binding domain and a chemical ligand comprising a sulfonylurea compound.

[0166] Any chemical ligand can be employed in the methods, so long as the ligand is compatible with the chemical-gene switch contained in the plant. Chemical ligands include, but are not limited to, tetracycline (when a tetracycline transcriptional repressor is used), or a sulfonylurea (when a Su(R) is employed).

[0167] When the chemically-regulated transcription repressor comprises a SuR, then the chemical ligand comprises a sulfonylurea compound. Sulfonylurea molecules comprise a sulfonylurea moiety (—S(O)2NHC(O)NH(R)—). In sulfonylurea herbicides the sulfonyl end of the sulfonylurea moiety is connected either directly or by way of an oxygen atom or an optionally substituted amino or methylene group to a typically substituted cyclic or acyclic group. At the opposite end of the sulfonylurea bridge, the amino group, which may have a substituent such as methyl (R being CH₃) instead of hydrogen, is connected to a heterocyclic group, typically a symmetric pyrimidine or triazine ring, having one or two substituents such as methyl, ethyl, trifluoromethyl, methoxy, ethoxy, methylamino, dimethylamino, ethylamino and the halogens. Sulfonylurea herbicides can be in the form of the free acid or a salt. In the free acid form the sulfonamide nitrogen on the bridge is not deprotonated (i.e., —S(O)2NHC(O)NH(R)—), while in the salt form the sulfonamide nitrogen atom on the bridge is deprotonated, and a cation is present, typically of an alkali metal or alkaline earth metal, most commonly sodium or potassium. Sulfonylurea compounds include, for example, compound classes such as pyrimidinylsulfonylurea compounds, triazinylsulfonylurea compounds, thiadiazolylurea compounds, and pharmaceuticals such as antidiabetic drugs, as well as salts and other derivatives thereof. Examples of pyrimidinylsulfonylurea compounds include amidosulfuron, azimsulfuron, bensulfuron, bensulfuron-methyl, chlorimuron, chlorimuron-ethyl, cyclosulfamuron, ethoxysulfuron, flazasulfuron, flucetosulfuron, flupyrsulfuron, flupyrsulfuron-methyl, foramsulfuron, halosulfuron, halosulfuron-methyl, imazosulfuron, mesosulfuron, mesosulfuron-methyl, nicosulfuron, orthosulfamuron, oxasulfuron, primisulfuron, primisulfuron-methyl, pyrazosulfuron, pyrazosulfuron-ethyl, rimsulfuron, sulfometuron, sulfometuron-methyl, sulfosulfuron, trifloxysulfuron and salts and derivatives thereof. Examples of triazinylsulfonylurea compounds include chlorsulfuron, cinosulfuron, ethametsulfuron, ethametsulfuron-methyl, iodosulfuron, iodosulfuron-methyl, metsulfuron, metsulfuron-methyl, prosulfuron, thifensulfuron, thifensulfuron-methyl, triasulfuron, tribenuron, tribenuron-methyl, triflusulfuron, triflusulfuron-methyl, tritosulfuron and salts and derivatives thereof. Examples of thiadiazolylurea compounds include buthiuron, ethidimuron, tebuthiuron, thiazafluron, thidiazuron, pyrimidinylsulfonylurea compound (e.g., amidosulfuron, azimsulfuron, bensulfuron, chlorimuron, cyclosulfamuron, ethoxysulfuron, flazasulfuron, flucetosulfuron, flupyrsulfuron, foramsulfuron, halosulfuron, imazosulfuron, mesosulfuron, nicosulfuron, orthosulfamuron, oxasulfuron, primisulftiron, pyrazosulfuron, rimsulfuron, sulfometuron, sulfosulfuron and trifloxysulfuron); a triazinylsulfonylurea compound (e.g., chlorsulfuron, cinosulfuron, ethametsulfuron, iodosulfuron, metsulfuron, prosulfuron, thifensulfuron, triasulfuron, tribenuron, triflusulfuron and tritosulfuron); or a thiadazolylurea compound (e.g., cloransulam, diclosulam, florasulam, flumetsulam, metosulam, and penoxsulam) and salts and derivatives thereof. Examples of antidiabetic drugs include acetohexamide, chlorpropamide, tolbutamide, tolazamide, glipizide, gliclazide, glibenclamide (glyburide), gliquidone, glimepiride and salts and derivatives thereof. In some systems, the SuR polypeptides specifically bind to more than one sulfonylurea compound, so one can chose which chemical ligand to apply to the plant.

[0168] In some examples, the sulfonylurea compound is selected from the group consisting of chlorsulfuron, ethametsulfuron-methyl, metsulfuron-methyl, thifensulfuron-methyl, sulfometuron-methyl, tribenuron-methyl, chlorimuron-ethyl, nicosulfuron, and rimsulfuron.

[0169] In other embodiments, the sulfonylurea compound comprises a pyrimidinylsulfonylurea, a triazinylsulfonylurea, a thiadazolylurea, a chlorosulfuron, an ethametsulfuron, a thifensulfuron, a metsulfuron, a sulfometuron, a tribenuron, a chlorimuron, a nicosulfuron, or a rimsulfuron compound.

[0170] In some embodiments, the sulfonylurea compound is an ethametsulfuron. In some examples the ethametsulfuron is provided at a concentration of about 0.001, 0.002, 0.003, 0.004, 0.005, 0.006, 0.007, 0.008, 0.009, 0.01, 0.02, 0.03, 0.04, 0.05, 0.06, 0.07, 0.08, 0.09, 0.10, 0.15, 0.2, 0.25, 0.3, 0.35, 0.4, 0.45, 0.5, 0.55, 0.6, 0.65, 0.7, 0.75, 0.8, 0.85, 0.9, 0.95, 1.0, 1.5, 2.0, 2.5, 3.0, 3.5, 4.0, 4.5, 5.0, 5.5, 6.0, 6.5, 7.0, 7.5, 8.0, 8.5, 9.0, 9.5, 10, 11, 12, 13, 14, 15, 16, 17, 18, 19, 20 μg/ml or greater applied as a tissue or root drench. Alternatively, the SU compound can be provided by spray at 1-400% of registered label application rates depending on the herbicide product. In some examples, the SuR polypeptide which employs the ethametsulfuron as a chemical ligand comprises a ligand binding domain having at least 50%60%, 65%, 66%, 67%, 68%, 69%, 70%, 71%, 72%, 73%, 74%, 75%, 76%, 77%, 78%, 79%, 80%, 81%, 82%, 83%, 84%, 85%, 86%, 87%, 88%, 89%, 90%, 91%, 92%, 93%, 94%, 95%, 96%, 97%, 98% or 99% sequence identity to a SuR polypeptide of SEQ ID NO:205-419, wherein the sequence identity is determined over the full length of the polypeptide using a global alignment method. In some examples the global alignment method is GAP, wherein the default parameters are for an amino acid sequence % identity and % similarity using a GAP Weight of 8 and a Length Weight of 2, and the BLOSUM62 scoring matrix. In some examples the polypeptide has a ligand binding domain from a SuR polypeptide selected from the group consisting of SEQ ID NO:205-419. In some examples the polypeptide is selected from the group consisting of SEQ ID NO:205-419. In some examples the polypeptide is encoded by a polynucleotide of SEQ ID NO:622-836.

[0171] In other embodiments, the sulfonylurea compound is chlorsulfuron. In some examples, the chlorsulfuron is provided at a concentration of about 0.001, 0.002, 0.003, 0.004, 0.005, 0.006, 0.007, 0.008, 0.009, 0.01, 0.02, 0.03, 0.04, 0.05, 0.06, 0.07, 0.08, 0.09, 0.10, 0.15, 0.2, 0.25, 0.3, 0.35, 0.4, 0.45, 0.5, 0.55, 0.6, 0.65, 0.7, 0.75, 0.8, 0.85, 0.9, 0.95, 1.0, 1.5, 2.0, 2.5, 3.0, 3.5, 4.0, 4.5, 5.0, 5.5, 6.0, 6.5, 7.0, 7.5, 8.0, 8.5, 9.0, 9.5, 10, 11, 12, 13, 14, 15, 16, 17, 18, 19, 20. In some examples the SuR polypeptide which employs the chlorsulfuron as a chemical ligand has a ligand binding domain having at least 50% 60%, 65%, 66%, 67%, 68%, 69%, 70%, 71%, 72%, 73%, 74%, 75%, 76%, 77%, 78%, 79%, 80%, 81%, 82%, 83%, 84%, 85%, 86%, 87%, 88%, 89%, 90%, 91%, 92%, 93%, 94%, 95%, 96%, 97%, 98% or 99% sequence identity to a SuR polypeptide of SEQ ID NO:14-204, wherein the sequence identity is determined over the full length of the polypeptide using a global alignment method. In some examples the global alignment method is GAP, wherein the default parameters are for an amino acid sequence % identity and % similarity using GAP Weight of 8 and Length Weight of 2 and the BLOSUM62 scoring matrix. In some examples the polypeptide has a ligand binding domain from a SuR polypeptide selected from the group consisting of SEQ ID NO:14-204. In some examples the polypeptide is selected from the group consisting of SEQ ID NO:14-204. In some examples, the polypeptide is encoded by a polynucleotide of SEQ ID NO:431-621.

[0172] By “contacting” or “providing to the plant or plant part” is intended any method whereby an effective amount of the chemical ligand is exposed to the plant, plant part, tissue or organ. The chemical ligand can be applied to the plant or plant part by, for example, spraying, atomizing, dusting, scattering, coating or pouring, introducing into or on the soil, introducing into irrigation water, by seed treatment or general application or dusting at the desirable time for the purpose at hand.

[0173] By “effective amount” of the chemical ligand is intended an amount of chemical ligand that is sufficient to allow for the desirable level of expression of the polynucleotide sequence of interest in a desired tissue or plant part. Generally, the effective amount of chemical ligand is sufficient to induce or increase expression of the polynucleotide of interest in the desired tissues in the plant, without significantly affecting the plant/crop. When the chemical ligand comprises a sulfonylurea, the effective amount may or may not be sufficient to control weeds. When desired, the expression of the polynucleotide of interest alters the phenotype and/or the genome of the plant.

[0174] In specific embodiments, contacting the effective amount of the chemical ligand to the plant results in a spatially or temporally extended expression of the polynucleotide of interest in the plant as compared to expression in a plant having been contacted with the effective amount of said chemical ligand and lacking the gene silencing construct. In some embodiments, the spatially or temporally extended expression of the polynucleotide of interest is achieved by providing an amount of chemical ligand smaller than the amount required to induce expression of the polynucleotide of interest in a plant lacking the gene silencing construct.

[0175] The spatially extended expression of the polynucleotide of interest can comprise the expression in at least one tissue of said plant not penetrated by the effective amount of the chemical ligand. In other embodiments, providing the chemical ligand results in the complete penetration of expression of the polynucleotide of interest in the shoot apical meristem of the plant or complete penetration of expression throughout the plant.

[0176] In a non-limiting embodiment, the method employs a first repressible promoter operably linked to the polynucleotide of interest, wherein the first repressible promoter comprises at least one, two, three or more operators. The silencing element is operably linked to a second repressible promoter comprising at least one, two, three or more operators, and the promoter operably linked to the chemically-regulated transcriptional repressor comprises a third repressible promoter, wherein the third repressible promoter comprises at least one, two or three or more operators regulating expression of the chemically-regulated transcriptional repressor.

[0177] The chemical ligand can be contacted to the plant in combination with an adjuvant or any other agent that provides a desired agricultural effect. As used herein, an “adjuvant” is any material added to a spray solution or formulation to modify the action of an agricultural chemical or the physical properties of the spray solution. See, for example, Green and Foy (2003) “Adjuvants: Tools for Enhancing Herbicide Performance,” in Weed Biology and Management, ed. Inderjit (Kluwer Academic Publishers, The Netherlands). Adjuvants can be categorized or subclassified as activators, acidifiers, buffers, additives, adherents, antiflocculants, antifoamers, defoamers, antifreezes, attractants, basic blends, chelating agents, cleaners, colorants or dyes, compatibility agents, cosolvents, couplers, crop oil concentrates, deposition agents, detergents, dispersants, drift control agents, emulsifiers, evaporation reducers, extenders, fertilizers, foam markers, formulants, inerts, humectants, methylated seed oils, high load COCs, polymers, modified vegetable oils, penetrators, repellants, petroleum oil concentrates, preservatives, rainfast agents, retention aids, solubilizers, surfactants, spreaders, stickers, spreader stickers, synergists, thickeners, translocation aids, uv protectants, vegetable oils, water conditioners, and wetting agents.

[0178] In addition, methods of the invention can comprise the use of a herbicide or a mixture of herbicides, as well as, one or more other insecticides, fungicides, nematocides, bactericides, acaricides, growth regulators, chemosterilants, semiochemicals, repellents, attractants, pheromones, feeding stimulants or other biologically active compounds or entomopathogenic bacteria, virus, or fungi to form a multi-component mixture giving an even broader spectrum of agricultural protection.

[0179] Methods can further comprise the use of plant growth regulators such as aviglycine, N-(phenylmethyl)-1H-purin-6-amine, ethephon, epocholeone, gibberellic acid, gibberellin A₄ and A₇, harpin protein, mepiquat chloride, prohexadione calcium, prohydrojasmon, sodium nitrophenolate and trinexapac-methyl, and plant growth modifying organisms such as Bacillus cereus strain BP01.

[0180] Methods include stringently and/or specifically controlling expression of a polynucleotide of interest. Stringency and/or specificity of modulating can be influenced by selecting the combination of elements used in the switch. These include, but are not limited to the promoter operably linked to the chemically-regulated transcriptional repressor, the chemically-regulated transcriptional repressor, the repressible promoter operably linked to the polynucleotide of interest, the polynucleotide of interest, the silencing element and the repressible promoter operably linked to the silencing element. Further control is provided by selection, dosage, conditions, and/or timing of the application of the chemical ligand. In some examples the expression of the polynucleotide of interest can be controlled more stringently, controlled in various tissues or cells, restricted to selected tissue or cell type, restricted to specific developmental stage(s), restricted to specific environmental conditions, and/or restricted to specific generation of a plant or progeny thereof. In some examples the repressor is operably linked to a constitutive promoter.

[0181] In some examples, the methods and compositions comprises a chemical-gene switch which may comprise additional elements. In some examples, one or more additional elements may provide means by which expression of the polynucleotide of interest can be controlled more stringently, controlled in various tissues or cells, restricted to selected tissue or cell type, restricted to specific developmental stage(s), restricted to specific environmental conditions, and/or restricted to specific generation of a plant or progeny thereof. In some examples those elements include site-specific recombination sites, site-specific recombinases, or combinations thereof.

[0182] In some methods, the chemical-gene switch may comprise a polynucleotide encoding a chemically-regulated transcriptional repressor, a promoter linked to a polynucleotide of interest comprising a sequence flanked by site-specific recombination sites, the silencing element operably linked to a repressible promoter, and a repressible promoter operably linked to a site-specific recombinase that specifically recognizes the site-specific recombination sites and implements a recombination event. In some examples, the recombination event is excision of the sequence flanked by the recombination sites. In some instances, the excision creates an operable linkage between the promoter and the polynucleotide of interest. In some examples, the promoter operably linked to the polynucleotide of interest is a non-constitutive promoter, including but not limited to a tissue preferred promoter, an inducible promoter, a repressible promoter, a developmental stage preferred promoter, or a promoter having more than one of these properties. In some examples expression of the polynucleotide of interest is primarily regulated in roots, leaves, stems, flowers, silks, anthers, pollen, meristem, germline, seed, endosperm, embryos, or progeny.

### VI. Novel Su Chemically-Regulated Transcriptional Regulators and Compositions and Methods Employing the Same

[0183] Further provided are methods and compositions which employ novel SU chemically-regulated transcriptional regulators. Non-limiting examples of these novel polynucleotides are set forth in SEQ ID NOS: 1193-1380 and 1949-2029 or active variants and fragments thereof and the encoded polypeptides set forth in SEQ ID NOS: 1381-1568 and 2030-2110 or active variants and fragments thereof.

[0184] Fragments and variants of SU chemically-regulated transcriptional regulators polynucleotides and polypeptides are also encompassed by the present invention. By “fragment” is intended a portion of the polynucleotide or a portion of the amino acid sequence and hence protein encoded thereby. Fragments of a polynucleotide may encode protein fragments that bind to a polynucleotide comprising an operator sequence, wherein the binding is regulated by a sulfonylurea compound. Alternatively, fragments of a polynucleotide that is useful as hybridization probes generally do not encode fragment proteins retaining biological activity. Thus, fragments of a nucleotide sequence may range from at least about 20 nucleotides, about 50 nucleotides, about 100 nucleotides, and up to the full-length polynucleotide encoding the SU chemically-regulated transcriptional regulators polypeptides.

[0185] A fragment of an SU chemically-regulated transcriptional regulators polynucleotide that encodes a biologically active portion of a SU chemically-regulated transcriptional regulator will encode at least 50, 75, 100, 150, 175, 200, 225, 250, 275, 300, 325, 350, 375, 400, 410, 415, 420, 425, 430, 435, or 440 contiguous amino acids, or up to the total number of amino acids present in a full-length SU chemically-regulated transcriptional regulators polypeptide. Fragments of an SU chemically-regulated transcriptional regulator polynucleotide that are useful as hybridization probes or PCR primers generally need not encode a biologically active portion of an SU chemically-regulated transcriptional regulator protein.

[0186] Thus, a fragment of an SU chemically-regulated transcriptional regulator polynucleotide may encode a biologically active portion of an SU chemically-regulated transcriptional regulator polypeptide, or it may be a fragment that can be used as a hybridization probe or PCR primer using methods disclosed below. A biologically active portion of an SU chemically-regulated transcriptional regulator polypeptide can be prepared by isolating a portion of one of the SU chemically-regulated transcriptional regulator polynucleotides, expressing the encoded portion of the SU chemically-regulated transcriptional regulator polypeptides (e.g., by recombinant expression in vitro), and assessing the activity of the portion of the SU chemically-regulated transcriptional regulator protein. Polynucleotides that are fragments of an SU chemically-regulated transcriptional regulator nucleotide sequence comprise at least 16, 20, 50, 75, 100, 150, 200, 250, 300, 350, 400, 450, 500, 550, 600, 650, 700, 800, 900, 1,000, 1,100, 1,200, 1,300, or 1,400 contiguous nucleotides, or up to the number of nucleotides present in a full-length SU chemically-regulated transcriptional regulator polynucleotide disclosed herein.

[0187] “Variant” protein is intended to mean a protein derived from the protein by deletion (i.e., truncation at the 5′ and/or 3′ end) and/or a deletion or addition of one or more amino acids at one or more internal sites in the native protein and/or substitution of one or more amino acids at one or more sites in the native protein. Variant proteins encompassed are biologically active, that is they continue to possess the desired biological activity of the native protein, that is, bind to a polynucleotide comprising an operator sequence, wherein the binding is regulated by a sulfonylurea compound. Such variants may result from, for example, genetic polymorphism or from human manipulation.

[0188] “Variants” is intended to mean substantially similar sequences. For polynucleotides, a variant comprises a polynucleotide having a deletion (i.e., truncations) at the 5′ and/or 3′ end and/or a deletion and/or addition of one or more nucleotides at one or more internal sites within the native polynucleotide and/or a substitution of one or more nucleotides at one or more sites in the native polynucleotide. As used herein, a “native” polynucleotide or polypeptide comprises a naturally occurring nucleotide sequence or amino acid sequence, respectively. For polynucleotides, conservative variants include those sequences that, because of the degeneracy of the genetic code, encode the amino acid sequence of one of the SU chemically-regulated transcriptional regulator polypeptides. Naturally occurring variants such as these can be identified with the use of well-known molecular biology techniques, as, for example, with polymerase chain reaction (PCR) and hybridization techniques as outlined below. Variant polynucleotides also include synthetically derived polynucleotides, such as those generated, for example, by using site-directed mutagenesis or gene synthesis but which still encode an SU chemically-regulated transcriptional regulator polypeptide.

[0189] Biologically active variants of an SU chemically-regulated transcriptional regulator polypeptide (and the polynucleotide encoding the same) will have at least about 75%, 80%, 85%, 90%, 91%, 92%, 93%, 94%, 95%, 96%, 97%, 98%, 99%, or more sequence identity to the polypeptide of any one of SEQ ID NO: 1381-1568 and 2030-2110 or with regard to any of the SU chemically-regulated transcriptional regulator polypeptides as determined by sequence alignment programs and parameters described elsewhere herein.

[0190] In still further embodiments, a biologically active variant of an SU chemically-regulated transcriptional regulator protein may differ from that protein by 200, 190, 180, 170, 160, 150, 140, 130, 120, 110, 100, 90, 80, 70, 60, 50, 40, 30, 25, 20, 19, 18, 17, 16 amino acid residues, as few as 1-15 amino acid residues, as few as 1-10, such as 6-10, as few as 10, 9, 8, 7, 6, 5, as few as 4, 3, 2, or even 1 amino acid residue.

[0191] The SU chemically-regulated transcriptional regulator polypeptide and the active variants and fragments thereof may be altered in various ways including amino acid substitutions, deletions, truncations, and insertions. Methods for such manipulations are generally known in the art. For example, amino acid sequence variants and fragments of the HPPD proteins can be prepared by mutations in the DNA. Methods for mutagenesis and polynucleotide alterations are well known in the art. See, for example, Kunkel (1985) Proc. Natl. Acad. Sci. USA 82:488-492; Kunkel et al. (1987) Methods in Enzymol. 154:367-382; U.S. Pat. No. 4,873,192; Walker and Gaastra, eds. (1983) Techniques in Molecular Biology (MacMillan Publishing Company, New York) and the references cited therein. Guidance as to appropriate amino acid substitutions that do not affect biological activity of the protein of interest may be found in the model of Dayhoff et al. (1978) Atlas of Protein Sequence and Structure (Natl. Biomed. Res. Found., Washington, D.C.), herein incorporated by reference. Conservative substitutions, such as exchanging one amino acid with another having similar properties, may be optimal.

[0192] Obviously, the mutations that will be made in the DNA encoding the variant must not place the sequence out of reading frame and optimally will not create complementary regions that could produce secondary mRNA structure. See, EP Patent Application Publication No. 75,444.

[0193] Variant polynucleotides and proteins also encompass sequences and proteins derived from a mutagenic and recombinogenic procedure such as DNA shuffling. With such a procedure, one or more different SU chemically-regulated transcriptional regulator coding sequences can be manipulated to create a new SU chemically-regulated transcriptional regulator possessing the desired properties. In this manner, libraries of recombinant polynucleotides are generated from a population of related sequence polynucleotides comprising sequence regions that have substantial sequence identity and can be homologously recombined in vitro or in vivo. For example, using this approach, sequence motifs encoding a domain of interest may be shuffled between the SU chemically-regulated transcriptional regulator sequences disclosed herein and other known SU chemically-regulated transcriptional regulator genes to obtain a new gene coding for a protein with an improved property of interest. Strategies for such DNA shuffling are known in the art. See, for example, Stemmer (1994) Proc. Natl. Acad. Sci. USA 91:10747-10751; Stemmer (1994) Nature 370:389-391; Crameri et al. (1997) Nature Biotech. 15:436-438; Moore et al. (1997) J. Mol. Biol. 272:336-347; Zhang et al. (1997) Proc. Natl. Acad. Sci. USA 94:4504-4509; Crameri et al. (1998) Nature 391:288-291; and U.S. Pat. Nos. 5,605,793 and 5,837,458.

[0194] Polynucleotides encoding the SU chemically-regulated transcriptional regulator polypeptide and the active variants and fragments thereof can be introduced into any of the DNA constructs discussed herein and further can be operably linked to any promoter sequence of interest. These constructs can be introduced/expressed in a host cell such as bacteria, yeast, insect, mammalian, or plant cells. Details for such methods are disclosed elsewherein herein, as is a detailed list of plants and plant cells that the sequences can be introduced into. Thus, various host cells, plants and plant cells are provided comprising the novel SU chemically-regulated transcriptional activators, including but not limited to, monocots and dicot plants such as corn, alfalfa, sunflower, Brassica, soybean, cotton, safflower, peanut, sorghum, wheat, millet, tobacco, etc.

[0195] In one embodiment, the novel SuR can be designed to contain a variety of different DNA binding domains and thereby bind a variety of different operators and influence transcription. In one embodiment, the SuR polypeptide comprises a DNA binding domain that specifically binds to a tetracycline operator. Thus, in specific embodiments, the SuR polypeptide or the polynucleotide encoding the same can comprise a DNA binding domain, including but not limited to, an operator DNA binding domain from repressors included tet, lac, trp, phd, arg, LexA, phiCh1 repressor, lambda C1 and Cro repressors, phage X repressor, MetJ, phir1t rro, phi434 C1 and Cro repressors, RafR, gal, ebg, uxuR, exuR, ROS, SinR, PurR, FruR, P22 C2, TetC, AcrR, Betl, Bm3R1, EnvR, QacR, MtrR, TcmR, Ttk, YbiH, YhgD, and mu Ner, or DNA binding domains in Interpro families including, but not limited to, IPR001647, IPR010982, and IPR01199, or an active variant or fragment thereof. Thus, the DNA binding specificity can be altered by fusing a SuR ligand binding domain to an alternate DNA binding domain. For example, the DNA binding domain from TetR class D can be fused to a SuR ligand binding domain to create SuR polypeptides that specifically bind to polynucleotides comprising a class D tetracycline operator. In some examples, a DNA binding domain variant or derivative can be used. For example, a DNA binding domain from a TetR variant that specifically recognizes a tetO-4C operator or a tetO-6C operator could be used (Helbl & Hillen (1998) J Mol Biol 276:313-318; Helbl et al. (1998) J Mol Biol 276:319-324).

[0196] In some examples, the chemically-regulated transcriptional repressor, or the polynucleotide encoding the same, includes a SuR polypeptide comprising a ligand binding domain comprising at least one amino acid substitution to a wild type tetracycline repressor protein ligand binding domain fused to a heterologous operator DNA binding domain which specifically binds to a polynucleotide comprising the operator sequence or derivative thereof, wherein repressor-operator binding is regulated by the absence or presence of a sulfonylurea compound. In specific embodiments, the heterologous operator DNA binding domain comprises a tetracycline operator sequence or active variant or fragment thereof, such that the repressor-operator binding is regulated by the absence or presence of a sulfonylurea compound.

[0197] In some examples, the SuR polypeptides, or polynucleotide encoding the same, comprise an amino acid substitution in the ligand binding domain of a wild type tetracycline repressor protein. In class B and D wild type TetR proteins, amino acid residues 6-52 represent the DNA binding domain. The remainder of the protein is involved in ligand binding and subsequent allosteric modification. For class B TetR residues 53-207 represent the ligand binding domain, while residues 53-218 comprise the ligand binding domain for the class D TetR. In some embodiments, the SuR polypeptides comprise at least one amino acid substitution in the ligand binding domain of a wild type TetR(B) protein, while in further examples, the SuR polypeptides comprise at least one amino acid substitution in the ligand binding domain of a wild type TetR(B) protein of SEQ ID NO:1.

[0198] In non-limiting embodiments, the SuR polypeptides can have an equilibrium binding constant for a sulfonylurea compound greater than 0.1 nM and less than 10 μM. In some examples, the SuR polypeptide has an equilibrium binding constant for a sulfonylurea compound of at least 0.1 nM, 0.5 nM, 1 nM, 10 nM, 50 nM, 100 nM, 250 nM, 500 nM, 750 nM, 1 μM, 5 μM, 7 μM but less than 10 μM. In other examples, the SuR polypeptide has an equilibrium binding constant for a sulfonylurea compound of at least 0.1 nM, 0.5 nM, 1 nM, 10 nM, 50 nM, 100 nM, 250 nM, 500 nM, 750 nM but less than 1 μM. In some embodiments, the SuR polypeptide has an equilibrium binding constant for a sulfonylurea compound greater than 0 nM, but less than 0.1 nM, 0.5 nM, 1 nM, 10 nM, 50 nM, 100 nM, 250 nM, 500 nM, 750 nM, 1 μM, 5 μM, 7 μM or 10 μM. In some examples, the sulfonylurea compound is a chlorsulfuron, an ethametsulfuron, a metsulfuron, a sulfometuron, a tribenuron, a chlorimuron, a nicosulfuron, a rimsulfuron and/or a thifensulfuron. In further embodiments, the SuR as set forth in SEQ ID NOS: 1381-1568 and 2030-2110 has an equilibrium binding constant for chlorsulruon. In other embodiments, the SuR as set forth in SEQ ID NO: 1381-1568 and 2030-2110 has an equilibrium binding constant for ethametsulfuron.

[0199] In some examples, the SuR polypeptides have an equilibrium binding constant for an operator sequence greater than 0.1 nM and less than 10 μM. In some examples the SuR polypeptide has an equilibrium binding constant for an operator sequence of at least 0.1 nM, 0.5 nM, 1 nM, 10 nM, 50 nM, 100 nM, 250 nM, 500 nM, 750 nM, 1 μM, 5 μM, 7 μM but less than 10 μM. In some examples, the SuR polypeptide has an equilibrium binding constant for an operator sequence of at least 0.1 nM, 0.5 nM, 1 nM, 10 nM, 50 nM, 100 nM, 250 nM, 500 nM, 750 nM but less than 1 μM. In some examples the SuR polypeptide has an equilibrium binding constant for an operator sequence greater than 0 nM, but less than 0.1 nM, 0.5 nM, 1 nM, 10 nM, 50 nM, 100 nM, 250 nM, 500 nM, 750 nM, 1 μM, 5 μM, 7 μM or 10 μM. In some examples, the operator sequence is a Tet operator sequence. In some examples, the Tet operator sequence is a TetR(A) operator sequence, a TetR(B) operator sequence, a TetR(D) operator sequence, TetR(E) operator sequence, a TetR(H) operator sequence, or a functional derivative thereof.

[0200] Various chemical ligands, including exemplary sulfonylurea chemical ligands, and the level and manner of application are discussed in detail elsewhere herein.

[0201] Various methods of employing Non-limiting examples of SuR polypeptides are set forth in U.S. Utility application Ser. No. 13/086,765, filed on Apr. 14, 2011 and in US Application Publication 2010-0105141, both of which are herein incorporated by reference in their entirety. Briefly, methods are further provided to regulate expression in a plant. The method comprises (a) providing a plant comprising (i) a first polynucleotide construct comprising a polynucleotide encoding a chemically-regulated transcriptional repressor operably linked to a promoter active in said plant, and, (ii) a second polynucleotide construct comprising a polynucleotide of interest operably linked to a first repressible promoter; wherein said first repressible promoter comprises at least one operator, wherein said chemically-regulated transcriptional repressor can bind to said operators in the absence of a chemical ligand and thereby repress transcription from said first repressible promoter in the absence of said chemical ligand, and wherein said plant is tolerant to said chemical ligand; (b) providing the plant with an effective amount of the chemical ligand whereby expression of said polynucleotide of interest are increased.

### VII. Sequence Identity

[0202] As used herein, “sequence identity” or “identity” in the context of two polynucleotides or polypeptide sequences makes reference to the residues in the two sequences that are the same when aligned for maximum correspondence over a specified comparison window. When percentage of sequence identity is used in reference to proteins it is recognized that residue positions which are not identical often differ by conservative amino acid substitutions, where amino acid residues are substituted for other amino acid residues with similar chemical properties (e.g., charge or hydrophobicity) and therefore do not change the functional properties of the molecule. When sequences differ in conservative substitutions, the percent sequence identity may be adjusted upwards to correct for the conservative nature of the substitution. Sequences that differ by such conservative substitutions are said to have “sequence similarity” or “similarity”. Means for making this adjustment are well known to those of skill in the art. Typically this involves scoring a conservative substitution as a partial rather than a full mismatch, thereby increasing the percentage sequence identity. Thus, for example, where an identical amino acid is given a score of 1 and a non-conservative substitution is given a score of zero, a conservative substitution is given a score between zero and 1. The scoring of conservative substitutions is calculated, e.g., as implemented in the program PC/GENE (Intelligenetics, Mountain View, Calif.).

[0203] As used herein, “percentage of sequence identity” means the value determined by comparing two optimally aligned sequences over a comparison window, wherein the portion of the polynucleotide sequence in the comparison window may comprise additions or deletions (i.e., gaps) as compared to the reference sequence (which does not comprise additions or deletions) for optimal alignment of the two sequences. The percentage is calculated by determining the number of positions at which the identical nucleic acid base or amino acid residue occurs in both sequences to yield the number of matched positions, dividing the number of matched positions by the total number of positions in the window of comparison, and multiplying the result by 100 to yield the percentage of sequence identity.

[0204] Unless otherwise stated, sequence identity/similarity values provided herein refer to the value obtained using GAP Version 10 using the following parameters: % identity and % similarity for a nucleotide sequence using GAP Weight of 50 and Length Weight of 3, and the nwsgapdna.cmp scoring matrix; % identity and % similarity for an amino acid sequence using GAP Weight of 8 and Length Weight of 2, and the BLOSUM62 scoring matrix; or any equivalent program thereof. By “equivalent program” is intended any sequence comparison program that, for any two sequences in question, generates an alignment having identical nucleotide or amino acid residue matches and an identical percent sequence identity when compared to the corresponding alignment generated by GAP Version 10.

[0205] By “fragment” is intended a portion of the polynucleotide. fragments of a nucleotide sequence may range from at least about 10, about 15, 20 nucleotides, about 50 nucleotides, about 75 nucleotides, about 100 nucleotides, 200 nucleotides, 300 nucleotides, 400 nucleotides, 500 nucleotides, 600 nucleotides, 700 nucleotides and up to the full-length any polynucleotide of the chemical-gene switch system. Methods to assay for the activity of a desired polynucleotide or polypeptide are described elsewhere herein.

[0206] “Variants” is intended to mean substantially similar sequences. For polynucleotides or polypeptides, a variant comprises a deletion and/or addition of one or more nucleotides or amino acids at one or more internal sites within the native polynucleotide or polypeptide and/or a substitution of one or more nucleotides or amino acids at one or more sites in the original polynucleotide or original polypeptide. Generally, variants of a particular polynucleotide or polypeptide employed herein having the desired activity will have at least about 40%, 45%, 50%, 55%, 60%, 65%, 70%, 75%, 80%, 85%, 90%, 91%, 92%, 93%, 94%, 95%, 96%, 97%, 98%, 99% or more sequence identity to that particular polynucleotide or polypeptide as determined by sequence alignment programs and parameters described elsewhere herein.

[0207] An “isolated” or “purified” polynucleotide or polypeptide or biologically active fragment or variant thereof, is substantially free of other cellular material, or culture medium when produced by recombinant techniques, or substantially free of chemical precursors or other chemicals when chemically synthesized. Preferably, an “isolated” nucleic acid is free of sequences (preferably protein encoding sequences) that naturally flank the nucleic acid (i.e., sequences located at the 5′ and 3′ ends of the nucleic acid) in the genomic DNA of the organism from which the nucleic acid is derived. For purposes of the invention, “isolated” when used to refer to nucleic acid molecules excludes isolated chromosomes. For example, in various embodiments, the isolated nucleic acid molecules can contain less than about 5 kb, 4 kb, 3 kb, 2 kb, 1 kb, 0.5 kb, or 0.1 kb of nucleotide sequences that naturally flank the nucleic acid molecule in genomic DNA of the cell from which the nucleic acid is derived.

[0208] Non-limiting embodiments include:

[0209] 1. A recombinant polynucleotide construct comprising:

[0210] (a) a polynucleotide of interest operably linked to a first repressible promoter active in a plant, wherein said first repressible promoter comprises at least one operator;

[0211] (b) a polynucleotide encoding a chemically-regulated transcriptional repressor operably linked to a promoter active in said plant; and

[0212] (c) a gene silencing construct operably linked to a second repressible promoter, wherein said gene silencing construct encodes a silencing element that decreases said chemically-regulated transcriptional repressor, wherein said second repressible promoter comprises at least one operator, and wherein said chemically-regulated transcriptional repressor can bind to each of said operators in the absence of a chemical ligand and thereby repress transcription from said first and said second repressible promoters in the absence of said chemical ligand.

[0213] 2. The recombinant polynucleotide construct of embodiment 1, wherein

[0214] (i) said first repressible promoter operably linked to said polynucleotide of interest comprises three of said operators; and/or

[0215] (ii) said promoter operably linked to said polynucleotide encoding said chemically-regulated transcriptional repressor comprises a third repressible promoter, wherein said third repressible promoter comprises at least one operator; and/or

[0216] (iii) said second repressible promoter operably linked to said gene silencing construct comprises three of said operators.

[0217] 3. The recombinant polynucleotide construct of embodiment 2, wherein said third repressible promoter operably linked to said polynucleotide encoding said chemically-regulated transcriptional repressor comprises two operators.

[0218] 4. The recombinant polynucleotide construct of embodiment 2, wherein said third repressible promoter operably linked to said polynucleotide encoding said chemically-regulated transcriptional repressor comprises three operators.

[0219] 5. The recombinant polynucleotide construct of any one of embodiments 1-4, wherein said polynucleotide encoding said chemically-regulated transcriptional repressor is regulated by a sulfonylurea compound.

[0220] 6. The recombinant polynucleotide construct of embodiment 5, wherein said sulfonylurea compound comprises a pyrimidinylsulfonylurea, a triazinylsulfonylurea, a thiadazolylurea compound, a chlorosulfuron, an ethametsulfuron, a thifensulfuron, a metsulfuron, a sulfometuron, a tribenuron, a chlorimuron, a nicosulfuron, or a rimsulfuron compound.

[0221] 7. The recombinant polynucleotide construct of any one of embodiments 1-4, wherein said polynucleotide encoding said chemically-regulated transcriptional repressor is regulated by tetracycline.

[0222] 8. The recombinant polynucleotide construct of any one of embodiments 1-7, wherein said gene silencing construct encodes a cell non-autonomous silencing element that decreases said chemically-regulated transcriptional repressor.

[0223] 9. The recombinant polynucleotide construct of any one of embodiments 1-7, wherein said silencing element comprises a siRNA, a trans-acting siRNA (TAS) or an amiRNA.

[0224] 10. The recombinant polynucleotide construct of any one of embodiments 1-7, wherein said silencing element comprises a hairpin RNA.

[0225] 11. The recombinant polynucleotide construct of embodiment 10, wherein said gene silencing construct comprising the silencing element comprises, in the following order, a first segment, a second segment, and a third segment, wherein
[0226] (a) said first segment comprises at least about 20 nucleotides having at least 90% sequence complementarity to the polynucleotide encoding said chemically-regulated transcriptional repressor;
[0227] (b) said second segment comprises a loop of sufficient length to allow the silencing element to be transcribed as a hairpin RNA; and,
[0228] (c) said third segment comprises at least about 20 nucleotides having at least 85% complementarity to the first segment.

[0229] 12. A plant cell comprising

[0230] (a) a first polynucleotide construct comprising a polynucleotide of interest operably linked to a first repressible promoter active in said plant cell, wherein said first repressible promoter comprises at least one operator;

[0231] (b) a second polynucleotide construct comprising a polynucleotide encoding a chemically-regulated transcriptional repressor operably linked to a promoter active in said plant cell; and,

[0232] (c) a third polynucleotide construct comprising a gene silencing construct operably linked to a second repressible promoter comprising at least one operator,

[0233] wherein (i) said gene silencing construct encodes a cell non-autonomous silencing element that decreases the level of said chemically-regulated transcriptional repressor, (ii) said second repressible promoter comprises at least one operator regulating expression of the gene silencing construct, (iii) said chemically-regulated transcriptional repressor can bind to each of said operators in the absence of a chemical ligand and thereby repress transcription of said first and said second repressible promoters in the absence of said chemical ligand, and (iv) said plant cell is tolerant to the chemical ligand.

[0234] 13. The plant cell of embodiment 12, wherein said first, second, and third polynucleotide constructs are contained on the same recombinant polynucleotide.

[0235] 14. The plant cell of any one of embodiments 12-13, wherein

[0236] (i) said first repressible promoter operably linked to said polynucleotide of interest comprises three of said operators; and/or

[0237] (ii) said promoter operably linked to said polynucleotide encoding said chemically-regulated transcriptional repressor comprises a third repressible promoter, wherein said third repressible promoter comprises at least one operator regulating expression of said repressor; and/or

[0238] (iii) said second repressible promoter operably linked to said gene silencing construct comprises three of said operators.

[0239] 15. The plant cell of embodiment 14, wherein said third repressible promoter operably linked to said polynucleotide encoding said chemically-regulated transcriptional repressor comprises two operators.

[0240] 16. The plant cell of embodiment 14, wherein said third repressible promoter operably linked to said polynucleotide encoding said chemically-regulated transcriptional repressor comprises three operators.

[0241] 17. The plant cell of any one of embodiments 12-16, wherein said chemically-regulated transcriptional repressor has a chemical ligand comprising a sulfonylurea compound.

[0242] 18. The plant cell of embodiment 17, wherein said sulfonylurea compound comprises a pyrimidinylsulfonylurea, a triazinylsulfonylurea, a thiadazolylurea compound, a chlorosulfuron, an ethametsulfuron, a thifensulfuron, a metsulfuron, a sulfometuron, a tribenuron, a chlorimuron, a nicosulfuron, or a rimsulfuron compound.

[0243] 19. The plant cell of any one of embodiments 12-16, wherein said chemically-regulated transcriptional repressor has a chemical ligand comprising tetracycline.

[0244] 20. The plant cell of any one of embodiments 12-19, wherein said gene silencing construct encodes a cell non-autonomous silencing element that decreases said chemically-regulated transcriptional repressor.

[0245] 21. The plant cell of any one of embodiments 12-19, wherein said silencing element comprises a siRNA, a trans-acting siRNA (TAS) or an amiRNA.

[0246] 22. The plant cell of any one of embodiments 12-19, wherein said silencing element comprises a hairpin RNA.

[0247] 23. The plant cell of embodiment 22, wherein said gene silencing construct comprising the silencing element comprises, in the following order, a first segment, a second segment, and a third segment, wherein

[0248] (a) said first segment comprises at least about 20 nucleotides having at least 90% sequence complementarity to the polynucleotide encoding said chemically-regulated transcriptional repressor;

[0249] (b) said second segment comprises a loop of sufficient length to allow the silencing element to be transcribed as a hairpin RNA; and,

[0250] (c) said third segment comprises at least about 20 nucleotides having at least 85% complementarity to the first segment.

[0251] 24. A plant comprising the plant cell of any one of embodiments 12-23.

[0252] 25. The plant of embodiment 24, wherein said plant is a monocot or dicot.

[0253] 26. The plant of embodiment 25, wherein said plant is maize, barley, millet, wheat, rice, sorghum, rye, soybean, canola, alfalfa, sunflower, safflower, sugarcane, tobacco, Arabidopsis, or cotton.

[0254] 27. The plant of any one of embodiments 24-26, wherein providing the plant with an effective amount of the chemical ligand (i) increases expression of said polynucleotide of interest and said silencing construct and (ii) decreases the level of said chemically-regulated transcriptional repressor in said plant or a part thereof.

[0255] 28. The plant of embodiment 27, wherein providing an effective amount of said chemical ligand to said plant results in spatially or temporally extended expression of said polynucleotide of interest in said plant as compared to expression in a plant having been contacted with said effective amount of said chemical ligand and lacking said gene silencing construct.

[0256] 29. The plant of embodiment 28, wherein said spatially or temporally extended expression of said polynucleotide of interest is achieved in said plant by providing an amount of chemical ligand smaller than the amount required to induce expression of said polynucleotide of interest in a plant lacking said gene silencing construct.

[0257] 30. The plant of embodiment 28, wherein said spatially extended expression of said polynucleotide of interest comprises expression in at least one tissue of said plant not penetrated by the effective amount of said chemical ligand.

[0258] 31. The plant of any one of embodiments 27-30, wherein providing said chemical ligand results in the complete penetration of expression of the polynucleotide of interest in the shoot apical meristem of said plant.

[0259] 32. The plant of any one of embodiments 27-30, wherein providing said chemical ligand results in the complete penetration of expression of said polynucleotide of interest throughout the plant.

[0260] 33. A transformed seed of the plant of any one of embodiments 25-32, wherein said seed comprises said first, second, and third polynucleotide construct.

[0261] 34. The transformed seed of embodiment 33, wherein said first, second, and third polynucleotide constructs are contained on the same recombinant polynucleotide.

[0262] 35. A method to regulate expression in a plant, comprising

[0263] (a) providing a plant comprising (i) a first polynucleotide construct comprising a polynucleotide encoding a chemically-regulated transcriptional repressor operably linked to a promoter active in said plant, (ii) a second polynucleotide construct comprising a polynucleotide of interest operably linked to a first repressible promoter, and (iii) a third polynucleotide construct comprising a gene silencing construct operably linked to a second repressible promoter,

[0264] wherein said gene silencing construct encodes a silencing element that decreases the level said chemically-regulated transcriptional repressor, wherein said first and second repressible promoters each comprise at least one operator, wherein said chemically-regulated transcriptional repressor can bind to each of said operators in the absence of a chemical ligand and thereby repress transcription from said first and said second repressible promoters in the absence of said chemical ligand, and wherein said plant is tolerant to said chemical ligand; and

[0265] (b) providing the plant with an effective amount of the chemical ligand whereby (i) expression of said polynucleotide of interest and said silencing construct are increased and (ii) the level of said chemically-regulated transcriptional repressor is decreased.

[0266] 36. The method of embodiment 35, wherein providing an effective amount of said chemical ligand to said plant results in spatially or temporally extended expression of said polynucleotide of interest in said plant as compared to expression in a plant having been contacted with said effective amount of said chemical ligand and lacking said gene silencing construct.

[0267] 37. The method of embodiment 36, wherein said spatially or temporally extended expression of said polynucleotide of interest is achieved by providing an amount of chemical ligand smaller than the amount required to induce expression of said polynucleotide of interest in a plant lacking said gene silencing construct.

[0268] 38. The method of any one of embodiments 36-37, wherein said spatially extended expression of said polynucleotide of interest comprises expression in at least one tissue of said plant not penetrated by the effective amount of said chemical ligand.

[0269] 39. The method of any one of embodiments 35-38, wherein providing said chemical ligand results in the spatially complete penetration of expression of the polynucleotide of interest in the shoot apical meristem of said plant.

[0270] 40. The method of any one of embodiments 35-38, wherein providing said chemical ligand results in the complete penetration of expression of said polynucleotide of interest throughout the plant.

[0271] 41. The method of any one of embodiments 35-40, wherein said chemical ligand is provided by spraying.

[0272] 42. The method of any one of embodiments 35-40, wherein said chemical ligand is provided by seed treatment.

[0273] 43. The method of any one of embodiments 35-42, wherein said first repressible promoter operably linked to said polynucleotide of interest comprises three of said operators, wherein said promoter operably linked to said chemically-regulated transcriptional repressor comprises a third repressible promoter, wherein said third repressible promoter comprises at least one operator, and wherein said second repressible promoter operably linked to said gene silencing construct comprises three of said operators.

[0274] 44. The method of embodiment 43, wherein said third repressible promoter operably linked to said chemically-regulated transcriptional repressor comprises two operators.

[0275] 45. The method of embodiment 43, wherein said third repressible promoter operably linked to said chemically-regulated transcriptional repressor comprises three operators.

[0276] 46. The method of any one of embodiments 35-45, wherein expression of the polynucleotide of interest alters the phenotype of the plant.

[0277] 47. The method of any one of embodiments 35-45, wherein expression of the polynucleotide of interest alters the genotype of the plant.

[0278] 48. The method of any one of embodiments 35-47, wherein said chemically-regulated transcriptional repressor has a chemical ligand comprising a sulfonylurea compound.

[0279] 49. The method of embodiment 48, wherein said sulfonylurea compound comprises a pyrimidinylsulfonylurea, a triazinylsulfonylurea, a thiadazolylurea, a chlorosulfuron, an ethametsulfuron, a thifensulfuron, a metsulfuron, a sulfometuron, a tribenuron, a chlorimuron, a nicosulfuron, or a rimsulfuron compound.

[0280] 50. The method of any one of embodiments 35-47, wherein said chemically-regulated transcriptional repressor has a chemical ligand comprising tetracycline.

[0281] 51. The method of any one of embodiments 35-47, wherein said gene silencing construct encodes a cell non-autonomous silencing element that decreases said chemically-regulated transcriptional repressor.

[0282] 52. The method of any one of embodiments 35-47, wherein said silencing element comprises a siRNA, a trans-acting siRNA (TAS) or an amiRNA.

[0283] 53. The method of any one of embodiments 35-47, wherein said silencing element comprises a hairpin RNA.

[0284] 54. The method of embodiment 53, wherein said gene silencing construct comprising the silencing element comprises, in the following order, a first segment, a second segment, and a third segment, wherein

[0285] (a) said first segment comprises at least about 20 nucleotides having at least 90% sequence complementarity to said chemically-regulated transcriptional repressor;

[0286] (b) said second segment comprises a loop of sufficient length to allow the silencing element to be transcribed as a hairpin RNA; and

[0287] (c) said third segment comprises at least about 20 nucleotides having at least 85% complementarity to the first segment.

[0288] 55. The method of any one of embodiments 35-54, wherein said silencing element is transported by the vasculature of said plant.

TABLE 1A
Non-limiting examples of components of the chemical-
gene switch presented in the sequence listing.

| SEQ ID NO | Brief Description |
|---|---|
| 1 | Amino acid sequence of TetR(B) |
| 2 | Amino acid sequence of a variant of SEQ ID NO: 1 |
| 3-13 | Amino acid sequence for some Su(R) polypeptides |
| 14-204 | Amino acid sequence for Su(R) polypeptides that |
| | can employ ethametsulfuron as a chemical ligand |
| 205-419 | Amino acid sequence for Su(R) polypeptides that |
| | can employ chlorsulfuron a chemical ligand. |
| 412-419 | Amino acid sequence of Su(R) polypeptides with reverse |
| | repressor activity |
| 420-430 | Nucleic acid sequence encoding SEQ ID NO: 3-13 |
| 431-621 | Nucleic acid sequence encoding SEQ ID NO: 431-621 |
| 622-836 | Nucleic acid sequence encoding SEQ ID NO: 405-419 |
| 837-840 | oligonucleotides |
| 841-847 | Various constructs |
| 848 | Tet operator sequence |
| 849 | Plant actin promoter |
| 850 | banana streak virus promoter (BSV) |
| 851 | a mirabilis mosaic virus promoter |
| 852 | enhanced MMV promoter (dMMV) |
| 853 | plant P450 promoter (MP1) |
| 854 | elongation factor 1a (EF1A) promoter |
| 855 | Plant actin promoter with tet op (actin/Op) |
| 856 | Banana steak virus promoter with tet op (BSV/Op) |
| 857 | mirabilis mosaic virus promoter with tet op (MMV/Op) |
| 858 | enhanced MMV promoter with tet op (dMMV/Op) |
| 859 | plant P450 promoter with tet op (MP1/Op) |
| 860 | elongation factor 1a promoter with tet op (EF1A/Op) |
| 861 | 35S CaMV promoter with ADH1 intron |
| 862 | 35SCaMV promoter engineered with tet operators |

TABLE 1B
Non-limiting examples of components of the chemical-
gene switch presented in the sequence listing.

| | | Description/clone |
|---|---|---|
| SEQ ID NO | type | name |
| 3 | AA | L1-02 |
| 4 | AA | L1-07 |
| 5 | AA | L1-09 |
| 6 | AA | L1-20 |
| 7 | AA | L1-22 |
| 8 | AA | L1-24 |
| 9 | AA | L1-28 |
| 10 | AA | L1-29 |
| 11 | AA | L1-31 |
| 12 | AA | L1-38 |
| 13 | AA | L1-44 |
| 14 | AA | L6-1B03 |
| 15 | AA | L6-1C03 |
| 16 | AA | L6-1C06 |
| 17 | AA | L6-1G06 |
| 18 | AA | L6-1G07 |
| 19 | AA | L6-1G09 |
| 20 | AA | L6-1G10 |
| 21 | AA | L6-1G11 |
| 22 | AA | L6-1H12 |
| 23 | AA | L6-2A01 |
| 24 | AA | L6-2A02 |
| 25 | AA | L6-2A04 |
| 26 | AA | L6-2A06 |
| 27 | AA | L6-2A12 |
| 28 | AA | L6-2B04 |
| 29 | AA | L6-2B06 |
| 30 | AA | L6-2B08 |
| 31 | AA | L6-2B09 |
| 32 | AA | L6-2B10 |
| 33 | AA | L6-2B11 |
| 34 | AA | L6-2C02 |
| 35 | AA | L6-2C05 |
| 36 | AA | L6-2C09 |
| 37 | AA | L6-2C10 |
| 38 | AA | L6-2C11 |
| 39 | AA | L6-2D01 |
| 40 | AA | L6-2D02 |
| 41 | AA | L6-2D03 |
| 42 | AA | L6-2D04 |
| 43 | AA | L6-2D07 |
| 44 | AA | L6-2D11 |
| 45 | AA | L6-2D12 |
| 46 | AA | L6-2E02 |
| 47 | AA | L6-2E03 |
| 48 | AA | L6-2E04 |
| 49 | AA | L6-2E05 |
| 50 | AA | L6-2E07 |
| 51 | AA | L6-2E08 |
| 52 | AA | L6-2E09 |
| 53 | AA | L6-2E11 |
| 54 | AA | L6-2F08 |
| 55 | AA | L6-2F10 |
| 56 | AA | L6-2F11 |
| 57 | AA | L6-2F12 |
| 58 | AA | L6-2G01 |
| 59 | AA | L6-2G02 |
| 60 | AA | L6-2G03 |
| 61 | AA | L6-2G05 |
| 62 | AA | L6-2G10 |
| 63 | AA | L6-2H01 |
| 64 | AA | L6-2H02 |
| 65 | AA | L6-2H03 |
| 66 | AA | L6-2H04 |
| 67 | AA | L6-2H06 |
| 68 | AA | L6-2H07 |
| 69 | AA | L6-2H10 |
| 70 | AA | L6-2H11 |
| 71 | AA | L6-3A01 |
| 72 | AA | L6-3A02 |
| 73 | AA | L6-3A03 |
| 74 | AA | L6-3A06 |
| 75 | AA | L6-3A11 |
| 76 | AA | L6-3B08 |
| 77 | AA | L6-3B09 |
| 78 | AA | L6-3C02 |
| 79 | AA | L6-3C04 |
| 80 | AA | L6-3C05 |
| 81 | AA | L6-3C06 |
| 82 | AA | L6-3D03 |
| 83 | AA | L6-3D05 |
| 84 | AA | L6-3D09 |
| 85 | AA | L6-3E08 |
| 86 | AA | L6-3E09 |
| 87 | AA | L6-3E10 |
| 88 | AA | L6-3F02 |
| 89 | AA | L6-3F09 |
| 90 | AA | L6-3F12 |
| 91 | AA | L6-3G03 |
| 92 | AA | L6-3G05 |
| 93 | AA | L6-3G09 |
| 94 | AA | L6-3H02 |
| 95 | AA | L6-3H05 |
| 96 | AA | L6-3H08 |
| 97 | AA | L6-4A01 |
| 98 | AA | L6-4A03 |
| 99 | AA | L6-4A04 |
| 100 | AA | L6-4A09 |
| 101 | AA | L6-4A10 |
| 102 | AA | L6-4A11 |
| 103 | AA | L6-4B05 |
| 104 | AA | L6-4B06 |
| 105 | AA | L6-4B07 |
| 106 | AA | L6-4B08 |
| 107 | AA | L6-4B12 |
| 108 | AA | L6-4C01 |
| 109 | AA | L6-4C03 |
| 110 | AA | L6-4C04 |
| 111 | AA | L6-4C07 |
| 112 | AA | L6-4C08 |
| 113 | AA | L6-4C09 |
| 114 | AA | L6-4C10 |
| 115 | AA | L6-4C11 |
| 116 | AA | L6-4D09 |
| 117 | AA | L6-4D10 |
| 118 | AA | L6-4E01 |
| 119 | AA | L6-4E02 |
| 120 | AA | L6-4E03 |
| 121 | AA | L6-4E05 |
| 122 | AA | L6-4E08 |
| 123 | AA | L6-4E09 |
| 124 | AA | L6-4E11 |
| 125 | AA | L6-4E12 |
| 126 | AA | L6-4F01 |
| 127 | AA | L6-4F10 |
| 128 | AA | L6-4F12 |
| 129 | AA | L6-4G02 |
| 130 | AA | L6-4G03 |
| 131 | AA | L6-4G06 |
| 132 | AA | L6-4G07 |
| 133 | AA | L6-4G08 |
| 134 | AA | L6-4G10 |
| 135 | AA | L6-4H07 |
| 136 | AA | L6-5A02 |
| 137 | AA | L6-5A03 |
| 138 | AA | L6-5A04 |
| 139 | AA | L6-5A05 |
| 140 | AA | L6-5A06 |
| 141 | AA | L6-5A07 |
| 142 | AA | L6-5A09 |
| 143 | AA | L6-5A10 |
| 144 | AA | L6-5B02 |
| 145 | AA | L6-5B07 |
| 146 | AA | L6-5B08 |
| 147 | AA | L6-5B11 |
| 148 | AA | L6-5C01 |
| 149 | AA | L6-5C02 |
| 150 | AA | L6-5C04 |
| 151 | AA | L6-5C08 |
| 152 | AA | L6-5C10 |
| 153 | AA | L6-5C11 |
| 154 | AA | L6-5D04 |
| 155 | AA | L6-5D09 |
| 156 | AA | L6-5D11 |
| 157 | AA | L6-5D12 |
| 158 | AA | L6-5E05 |
| 159 | AA | L6-5E09 |
| 160 | AA | L6-5F02 |
| 161 | AA | L6-5F04 |
| 162 | AA | L6-5F05 |
| 163 | AA | L6-5F07 |
| 164 | AA | L6-5F08 |
| 165 | AA | L6-5F10 |
| 166 | AA | L6-5F12 |
| 167 | AA | L6-5G03 |
| 168 | AA | L6-5G05 |
| 169 | AA | L6-5G06 |
| 170 | AA | L6-5G08 |
| 171 | AA | L6-5G11 |
| 172 | AA | L6-5G12 |
| 173 | AA | L6-5H03 |
| 174 | AA | L6-5H06 |
| 175 | AA | L6-5H07 |
| 176 | AA | L6-5H12 |
| 177 | AA | L6-6A09 |
| 178 | AA | L6-6B01 |
| 179 | AA | L6-6B03 |
| 180 | AA | L6-6B04 |
| 181 | AA | L6-6B05 |
| 182 | AA | L6-6B10 |
| 183 | AA | L6-6C01 |
| 184 | AA | L6-6C02 |
| 185 | AA | L6-6C04 |
| 186 | AA | L6-6C05 |
| 187 | AA | L6-6C06 |
| 188 | AA | L6-6C07 |
| 189 | AA | L6-6C10 |
| 190 | AA | L6-6C11 |
| 191 | AA | L6-6D02 |
| 192 | AA | L6-6D06 |
| 193 | AA | L6-6D07 |
| 194 | AA | L6-6D09 |
| 195 | AA | L6-6D10 |
| 196 | AA | L6-6D12 |
| 197 | AA | L6-6E01 |
| 198 | AA | L6-6E02 |
| 199 | AA | L6-6E03 |
| 200 | AA | L6-6E11 |
| 201 | AA | L6-6F03 |
| 202 | AA | L6-6F07 |
| 203 | AA | L6-6F08 |
| 204 | AA | L6-6G01 |
| 205 | AA | L7-1A01 |
| 206 | AA | L7-1B01 |
| 207 | AA | L7-1C01 |
| 208 | AA | L7-1D01 |
| 209 | AA | L7-1E01 |
| 210 | AA | L7-1F01 |
| 211 | AA | L7-1G01 |
| 212 | AA | L7-1C02 |
| 213 | AA | L7-1D02 |
| 214 | AA | L7-1E02 |
| 215 | AA | L7-1F02 |
| 216 | AA | L7-1G02 |
| 217 | AA | L7-1H02 |
| 218 | AA | L7-1C03 |
| 219 | AA | L7-1E03 |
| 220 | AA | L7-1A04 |
| 221 | AA | L7-1C04 |
| 222 | AA | L7-1D04 |
| 223 | AA | L7-1E04 |
| 224 | AA | L7-1F04 |
| 225 | AA | L7-1G04 |
| 226 | AA | L7-1H04 |
| 227 | AA | L7-1A05 |
| 228 | AA | L7-1C05 |
| 229 | AA | L7-1E05 |
| 230 | AA | L7-1F05 |
| 231 | AA | L7-1A06 |
| 232 | AA | L7-1B06 |
| 233 | AA | L7-1D06 |
| 234 | AA | L7-1E06 |
| 235 | AA | L7-1F06 |
| 236 | AA | L7-1G06 |
| 237 | AA | L7-1H06 |
| 238 | AA | L7-1A07 |
| 239 | AA | L7-1B07 |
| 240 | AA | L7-1C07 |
| 241 | AA | L7-1D07 |
| 242 | AA | L7-1E07 |
| 243 | AA | L7-1F07 |
| 244 | AA | L7-1G07 |
| 245 | AA | L7-1A08 |
| 246 | AA | L7-1C08 |
| 247 | AA | L7-1D08 |
| 248 | AA | L7-1E08 |
| 249 | AA | L7-1F08 |
| 250 | AA | L7-1G08 |
| 251 | AA | L7-1A09 |
| 252 | AA | L7-1B09 |
| 253 | AA | L7-1C09 |
| 254 | AA | L7-1D09 |
| 255 | AA | L7-1E09 |
| 256 | AA | L7-1G09 |
| 257 | AA | L7-1A10 |
| 258 | AA | L7-1B10 |
| 259 | AA | L7-1C10 |
| 260 | AA | L7-1D10 |
| 261 | AA | L7-1F10 |
| 262 | AA | L7-1A11 |
| 263 | AA | L7-1B11 |
| 264 | AA | L7-1C11 |
| 265 | AA | L7-1E11 |
| 266 | AA | L7-1A12 |
| 267 | AA | L7-1C12 |
| 268 | AA | L7-1F12 |
| 269 | AA | L7-1G12 |
| 270 | AA | L7-2A01 |
| 271 | AA | L7-2B01 |
| 272 | AA | L7-2D01 |
| 273 | AA | L7-2E01 |
| 274 | AA | L7-2F01 |
| 275 | AA | L7-2G01 |
| 276 | AA | L7-2H01 |
| 277 | AA | L7-2B02 |
| 278 | AA | L7-2D02 |
| 279 | AA | L7-2E02 |
| 280 | AA | L7-2F02 |
| 281 | AA | L7-2G02 |
| 282 | AA | L7-2H02 |
| 283 | AA | L7-2D03 |
| 284 | AA | L7-2E03 |
| 285 | AA | L7-2F03 |
| 286 | AA | L7-2G03 |
| 287 | AA | L7-2H03 |
| 288 | AA | L7-2D04 |
| 289 | AA | L7-2E04 |
| 290 | AA | L7-2F04 |
| 291 | AA | L7-2H04 |
| 292 | AA | L7-2B05 |
| 293 | AA | L7-2D05 |
| 294 | AA | L7-2E05 |
| 295 | AA | L7-2F05 |
| 296 | AA | L7-2H05 |
| 297 | AA | L7-2A06 |
| 298 | AA | L7-2C06 |
| 299 | AA | L7-2D06 |
| 300 | AA | L7-2F06 |
| 301 | AA | L7-2G06 |
| 302 | AA | L7-2A07 |
| 303 | AA | L7-2B07 |
| 304 | AA | L7-2C07 |
| 305 | AA | L7-2D07 |
| 306 | AA | L7-2E07 |
| 307 | AA | L7-2G07 |
| 308 | AA | L7-2B08 |
| 309 | AA | L7-2D08 |
| 310 | AA | L7-2F08 |
| 311 | AA | L7-2G08 |
| 312 | AA | L7-2B09 |
| 313 | AA | L7-2C09 |
| 314 | AA | L7-2E09 |
| 315 | AA | L7-2B10 |
| 316 | AA | L7-2E10 |
| 317 | AA | L7-2G10 |
| 318 | AA | L7-2C11 |
| 319 | AA | L7-2D11 |
| 320 | AA | L7-2F11 |
| 321 | AA | L7-2G11 |
| 322 | AA | L7-2B12 |
| 323 | AA | L7-2C12 |
| 324 | AA | L7-2D12 |
| 325 | AA | L7-2F12 |
| 326 | AA | L7-2G12 |
| 327 | AA | L7-3A01 |
| 328 | AA | L7-3C01 |
| 329 | AA | L7-3G01 |
| 330 | AA | L7-3H01 |
| 331 | AA | L7-3A02 |
| 332 | AA | L7-3B02 |
| 333 | AA | L7-3D02 |
| 334 | AA | L7-3G02 |
| 335 | AA | L7-3H02 |
| 336 | AA | L7-3B03 |
| 337 | AA | L7-3C03 |
| 338 | AA | L7-3E03 |
| 339 | AA | L7-3G03 |
| 340 | AA | L7-3H03 |
| 341 | AA | L7-3B04 |
| 342 | AA | L7-3E04 |
| 343 | AA | L7-3G04 |
| 344 | AA | L7-3A05 |
| 345 | AA | L7-3B05 |
| 346 | AA | L7-3H05 |
| 347 | AA | L7-3B06 |
| 348 | AA | L7-3D06 |
| 349 | AA | L7-3E06 |
| 350 | AA | L7-3A07 |
| 351 | AA | L7-3C07 |
| 352 | AA | L7-3F07 |
| 353 | AA | L7-3A08 |
| 354 | AA | L7-3B08 |
| 355 | AA | L7-3C08 |
| 356 | AA | L7-3F08 |
| 357 | AA | L7-3G08 |
| 358 | AA | L7-3B09 |
| 359 | AA | L7-3F09 |
| 360 | AA | L7-3A10 |
| 361 | AA | L7-3B10 |
| 362 | AA | L7-3C10 |
| 363 | AA | L7-3G10 |
| 364 | AA | L7-3A11 |
| 365 | AA | L7-3C11 |
| 366 | AA | L7-3E11 |
| 367 | AA | L7-3G11 |
| 368 | AA | L7-3A12 |
| 369 | AA | L7-3B12 |
| 370 | AA | L7-3C12 |
| 371 | AA | L7-3E12 |
| 372 | AA | L7-3F12 |
| 373 | AA | L7-3G12 |
| 374 | AA | L7-4A01 |
| 375 | AA | L7-4A03 |
| 376 | AA | L7-4A04 |
| 377 | AA | L7-4A06 |
| 378 | AA | L7-4A08 |
| 379 | AA | L7-4A09 |
| 380 | AA | L7-4A12 |
| 381 | AA | L7-4B03 |
| 382 | AA | L7-4B04 |
| 383 | AA | L7-4B06 |
| 384 | AA | L7-4B07 |
| 385 | AA | L7-4C01 |
| 386 | AA | L7-4C03 |
| 387 | AA | L7-4C04 |
| 388 | AA | L7-4C06 |
| 389 | AA | L7-4C09 |
| 390 | AA | L7-4C12 |
| 391 | AA | L7-4D04 |
| 392 | AA | L7-4D07 |
| 393 | AA | L7-4D08 |
| 394 | AA | L7-4D10 |
| 395 | AA | L7-4D11 |
| 396 | AA | L7-4E01 |
| 397 | AA | L7-4E02 |
| 398 | AA | L7-4E04 |
| 399 | AA | L7-4E05 |
| 400 | AA | L7-4E07 |
| 401 | AA | L7-4E08 |
| 402 | AA | L6-3A09 |
| 403 | AA | L7-4C06 |
| 404 | AA | L10-84 |
| 405 | AA | L13-2-46 |
| 406 | AA | L12-1-10 |
| 407 | AA | L13-2-23 |
| 408 | AA | L7-1C3-A5 |
| 409 | AA | L7-1F8-A11 |
| 410 | AA | L7-1G6-B2 |
| 411 | AA | L7-3E3-D1 |
| 412 | AA | L1-18 |
| 413 | AA | L1-21 |
| 414 | AA | L1-25 |
| 415 | AA | L1-33 |
| 416 | AA | L1-34 |
| 417 | AA | L1-36 |
| 418 | AA | L1-39 |
| 419 | AA | L1-41 |
| 420 | DNA | L1-02 CDS |
| 421 | DNA | L1-07 CDS |
| 422 | DNA | L1-09 CDS |
| 423 | DNA | L1-20 CDS |
| 424 | DNA | L1-22 CDS |
| 425 | DNA | L1-24 CDS |
| 426 | DNA | L1-28 CDS |
| 427 | DNA | L1-29 CDS |
| 428 | DNA | L1-31 CDS |
| 429 | DNA | L1-38 CDS |
| 430 | DNA | L1-44 CDS |
| 431 | DNA | L6-1B03 CDS |
| 432 | DNA | L6-1C03 CDS |
| 433 | DNA | L6-1C06 CDS |
| 434 | DNA | L6-1G06 CDS |
| 435 | DNA | L6-1G07 CDS |
| 436 | DNA | L6-1G09 CDS |
| 437 | DNA | L6-1G10 CDS |
| 438 | DNA | L6-1G11 CDS |
| 439 | DNA | L6-1H12 CDS |
| 440 | DNA | L6-2A01 CDS |
| 441 | DNA | L6-2A02 CDS |
| 442 | DNA | L6-2A04 CDS |
| 443 | DNA | L6-2A06 CDS |
| 444 | DNA | L6-2A12 CDS |
| 445 | DNA | L6-2B04 CDS |
| 446 | DNA | L6-2B06 CDS |
| 447 | DNA | L6-2B08 CDS |
| 448 | DNA | L6-2B09 CDS |
| 449 | DNA | L6-2B10 CDS |
| 450 | DNA | L6-2B11 CDS |
| 451 | DNA | L6-2C02 CDS |
| 452 | DNA | L6-2C05 CDS |
| 453 | DNA | L6-2C09 CDS |
| 454 | DNA | L6-2C10 CDS |
| 455 | DNA | L6-2C11 CDS |
| 456 | DNA | L6-2D01 CDS |
| 457 | DNA | L6-2D02 CDS |
| 458 | DNA | L6-2D03 CDS |
| 459 | DNA | L6-2D04 CDS |
| 460 | DNA | L6-2D07 CDS |
| 461 | DNA | L6-2D11 CDS |
| 462 | DNA | L6-2D12 CDS |
| 463 | DNA | L6-2E02 CDS |
| 464 | DNA | L62E03 CDS |
| 465 | DNA | L6-2E04 CDs |
| 466 | DNA | L6-2E05 CDS |
| 467 | DNA | L6-2E07 CDS |
| 468 | DNA | L6-2E08 CDS |
| 469 | DNA | L6-2E09 CDS |
| 470 | DNA | L6-2E11 CDS |
| 471 | DNA | L6-2F08 CDS |
| 472 | DNA | L6-2F10 CDS |
| 473 | DNA | L6-2F11 CDS |
| 474 | DNA | L6-2F12 CDS |
| 475 | DNA | L6-2G01 CDS |
| 476 | DNA | L6-2G02 CDS |
| 477 | DNA | L6-2G03 CDS |
| 478 | DNA | L6-2G05 CDS |
| 479 | DNA | L6-2G10 CDS |
| 480 | DNA | L6-2H01 CDS |
| 481 | DNA | L6-2H02 CDS |
| 482 | DNA | L6-2H03 CDS |
| 483 | DNA | L6-2H04 CDS |
| 484 | DNA | L6-2H06 CDS |
| 485 | DNA | L6-2H07 CDS |
| 486 | DNA | L6-2H10 CDS |
| 487 | DNA | L6-2H11 CDS |
| 488 | DNA | L6-3A01 CDS |
| 489 | DNA | L6-3A02 CDS |
| 490 | DNA | L6-3A03 CDS |
| 491 | DNA | L6-3A06 CDS |
| 492 | DNA | L6-3A11 CDS |
| 493 | DNA | L6-3B08 CDS |
| 494 | DNA | L6-3B09 CDS |
| 495 | DNA | L6-3C02 CDS |
| 496 | DNA | L6-3C04 CDS |
| 497 | DNA | L6-3C05 CDS |
| 498 | DNA | L6-3C06 CDS |
| 499 | DNA | L6-3D03 CDS |
| 500 | DNA | L6-3D05 CDS |
| 501 | DNA | L6-3D09 CDS |
| 502 | DNA | L6-3E08 CDS |
| 503 | DNA | L6-3E09 CDS |
| 504 | DNA | L6-3E10 CDS |
| 505 | DNA | L6-3F02 CDS |
| 506 | DNA | L6-3F09 CDS |
| 507 | DNA | L6-3F12 CDS |
| 508 | DNA | L6-3G03 CDS |
| 509 | DNA | L6-3G05 CDS |
| 510 | DNA | L6-3G09 CDS |
| 511 | DNA | L6-3H02 CDS |
| 512 | DNA | L6-3H05 CDS |
| 513 | DNA | L6-3H08 CDS |
| 514 | DNA | L6-4A01 CDS |
| 515 | DNA | L6-4A03 CDS |
| 516 | DNA | L6-4A04 CDS |
| 517 | DNA | L6-4A09 CDS |
| 518 | DNA | L6-4A10 CDS |
| 519 | DNA | L6-4A11 CDS |
| 520 | DNA | L6-4B05 CDS |
| 521 | DNA | L6-4B06 CDS |
| 522 | DNA | L6-4B07 CDS |
| 523 | DNA | L6-4B08 CDS |
| 524 | DNA | L6-4B12 CDS |
| 525 | DNA | L6-4C01 CDS |
| 526 | DNA | L6-4C03 CDS |
| 527 | DNA | L6-4C04 CDS |
| 528 | DNA | L6-4C07 CDS |
| 529 | DNA | L6-4C08 CDS |
| 530 | DNA | L6-4C09 CDS |
| 531 | DNA | L6-4C10 CDS |
| 532 | DNA | L6-4C11 CDS |
| 533 | DNA | L6-4D09 CDS |
| 534 | DNA | L6-4D10 CDS |
| 535 | DNA | L6-4E01 CDS |
| 536 | DNA | L6-4E02 CDS |
| 537 | DNA | L6-4E03 CDS |
| 538 | DNA | L6-4E05 CDS |
| 539 | DNA | L6-4E08 CDS |
| 540 | DNA | L6-4E09 CDS |
| 541 | DNA | L6-4E11 CDS |
| 542 | DNA | L6-4E12 CDS |
| 543 | DNA | L6-4F01 CDS |
| 544 | DNA | L6-4F10 CDS |
| 545 | DNA | L6-4F12 CDS |
| 546 | DNA | L6-4G02 CDS |
| 547 | DNA | L6-4G03 CDS |
| 548 | DNA | L6-4G06 CDS |
| 549 | DNA | L6-4G07 CDS |
| 550 | DNA | L6-4G08 CDS |
| 551 | DNA | L6-4G10 CDS |
| 552 | DNA | L6-4H07 CDS |
| 553 | DNA | L6-5A02 CDS |
| 554 | DNA | L6-5A03 CDS |
| 555 | DNA | L6-5A04 CDS |
| 556 | DNA | L6-5A05 CDS |
| 557 | DNA | L6-5A06 CDS |
| 558 | DNA | L6-5A07 CDS |
| 559 | DNA | L6-5A09 CDS |
| 560 | DNA | L6-5A10 CDS |
| 561 | DNA | L6-5B02 CDS |
| 562 | DNA | L6-5B07 CDS |
| 563 | DNA | L6-5B08 CDS |
| 564 | DNA | L6-5B11 CDS |
| 565 | DNA | L6-5C01 CDS |
| 566 | DNA | L6-5C02 CDS |
| 567 | DNA | L6-5C04 CDS |
| 568 | DNA | L6-5C08 CDS |
| 569 | DNA | L6-5C10 CDS |
| 570 | DNA | L6-5C11 CDS |
| 571 | DNA | L6-5D04 CDS |
| 572 | DNA | L6-5D09 CDS |
| 573 | DNA | L6-5D11 CDS |
| 574 | DNA | L6-5D12 CDS |
| 575 | DNA | L6-5E05 CDS |
| 576 | DNA | L6-5E09 CDS |
| 577 | DNA | L6-5F02 CDS |
| 578 | DNA | L6-5F04 CDS |
| 579 | DNA | L6-5F05 CDS |
| 580 | DNA | L6-5F07 CDS |
| 581 | DNA | L6-5F08 CDS |
| 582 | DNA | L6-5F10 CDS |
| 583 | DNA | L6-5F12 CDS |
| 584 | DNA | L6-5G03 CDS |
| 585 | DNA | L6-5G05 CDS |
| 586 | DNA | L6-5G06 CDS |
| 587 | DNA | L6-5G08 CDS |
| 588 | DNA | L6-5G11 CDS |
| 589 | DNA | L6-5G12 CDS |
| 590 | DNA | L6-5H03 CDS |
| 591 | DNA | L6-5H06 CDS |
| 592 | DNA | L6-5H07 CDS |
| 593 | DNA | L6-5H12 CDS |
| 594 | DNA | L6-6A09 CDS |
| 595 | DNA | L6-6B01 CDS |
| 596 | DNA | L6-6B03 CDS |
| 597 | DNA | L6-6B04 CDS |
| 598 | DNA | L6-6B05 CDS |
| 599 | DNA | L6-6B10 CDS |
| 600 | DNA | L6-6C01 CDS |
| 601 | DNA | L6-6C02 CDS |
| 602 | DNA | L6-6C04 CDS |
| 603 | DNA | L6-6C05 CDS |
| 604 | DNA | L6-6C06 CDS |
| 605 | DNA | L6-6C07 CDS |
| 606 | DNA | L6-6C10 CDS |
| 607 | DNA | L6-6C11 CDS |
| 608 | DNA | L6-6D02 CDS |
| 609 | DNA | L6-6D06 CDS |
| 610 | DNA | L6-6D07 CDS |
| 611 | DNA | L6-6D09 CDS |
| 612 | DNA | L6-6D10 CDS |
| 613 | DNA | L6-6D12 CDS |
| 614 | DNA | L6-6E01 CDS |
| 615 | DNA | L6-6E02 CDS |
| 616 | DNA | L6-6E03 CDS |
| 617 | DNA | L6-6E11CDS |
| 618 | DNA | L6-6F03 CDS |
| 619 | DNA | L6-6F07 CDS |
| 620 | DNA | L6-6F08 CDS |
| 621 | DNA | L6-6G01 CDS |
| 622 | DNA | L7-1A01 CDS |
| 623 | DNA | L7-1B01 Cds |
| 624 | DNA | L7-1C01 CDS |
| 625 | DNA | L7-1D01 CDS |
| 626 | DNA | L7-1E01 CDS |
| 627 | DNA | L7-1F01 CDS |
| 628 | DNA | L7-1G01 CDS |
| 629 | DNA | L7-1C02 CDS |
| 630 | DNA | L7-1D02 CDS |
| 631 | DNA | L7-1E02 CDS |
| 632 | DNA | L7-1F02 CDS |
| 633 | DNA | L7-1G02 CDS |
| 634 | DNA | L7-1H02 CDS |
| 635 | DNA | L7-1C03 CDS |
| 636 | DNA | L7-1E03 CDS |
| 637 | DNA | L7-1A04 CDS |
| 638 | DNA | L7-1C04 CDS |
| 639 | DNA | L7-1D04 CDS |
| 640 | DNA | L7-1E04 CDS |
| 641 | DNA | L7-1F04 CDS |
| 642 | DNA | L7-1G04 CDS |
| 643 | DNA | L7-1H04 CDS |
| 644 | DNA | L7-1A05 CDS |
| 645 | DNA | L7-1C05 CDS |
| 646 | DNA | L7-1E05 CDS |
| 647 | DNA | L7-1F05 CDS |
| 648 | DNA | L7-1A06 CDS |
| 649 | DNA | L7-1B06 CDS |
| 650 | DNA | L7-1D06 CDS |
| 651 | DNA | L7-1E06 CDS |
| 652 | DNA | L7-1F06 CDS |
| 653 | DNA | L7-1G06 CDS |
| 654 | DNA | L7-1H06 CDS |
| 655 | DNA | L7-1A07 CDS |
| 656 | DNA | L7-1B07 CDS |
| 657 | DNA | L7-1C07 CDS |
| 658 | DNA | L7-1D07 CDS |
| 659 | DNA | L7-1E07 CDS |
| 660 | DNA | L7-1F07 CDS |
| 661 | DNA | L7-1G07 CDS |
| 662 | DNA | L7-1A08 CDS |
| 663 | DNA | L7-1C08 CDS |
| 664 | DNA | L7-1D08 CDS |
| 665 | DNA | L7-1E08 CDS |
| 666 | DNA | L7-1F08 CDS |
| 667 | DNA | L7-1G08 CDS |
| 668 | DNA | L7-1A09 CDS |
| 669 | DNA | L7-1B09 CDS |
| 670 | DNA | L7-1C09 CDS |
| 671 | DNA | L7-1D09 CDS |
| 672 | DNA | L7-1E09 CDS |
| 673 | DNA | L7-1G09 CDS |
| 674 | DNA | L7-1A10 CDS |
| 675 | DNA | L7-1B10 CDS |
| 676 | DNA | L7-1C10 CDS |
| 677 | DNA | L7-1D10 CDS |
| 678 | DNA | L7-1F10 CDS |
| 679 | DNA | L7-1A11 CDS |
| 680 | DNA | L7-1B11 CDS |
| 681 | DNA | L7-1C11 CDS |
| 682 | DNA | L7-1E11 CDS |
| 683 | DNA | L7-1A12 CDS |
| 684 | DNA | L7-1C12 CDS |
| 685 | DNA | L7-1F12 CDS |
| 686 | DNA | L7-1G12 CDS |
| 687 | DNA | L7-2A01 CDS |
| 688 | DNA | L7-2B01 CDS |
| 689 | DNA | L7-2D01 CDS |
| 690 | DNA | L7-2E01 CDS |
| 691 | DNA | L7-2F01 CDS |
| 692 | DNA | L7-2G01 CDS |
| 693 | DNA | L7-2H01 CDS |
| 694 | DNA | L7-2B02 CDS |
| 695 | DNA | L7-2D02 CDS |
| 696 | DNA | L7-2E02 CDS |
| 697 | DNA | L7-2F02 CDS |
| 698 | DNA | L7-2G02 CDS |
| 699 | DNA | L7-2H02 CDS |
| 700 | DNA | L7-2D03 CDS |
| 701 | DNA | L7-2E03 CDS |
| 702 | DNA | L7-2F03 CDS |
| 703 | DNA | L7-2G03 CDS |
| 704 | DNA | L7-2H03 CDS |
| 705 | DNA | L7-2D04 CDS |
| 706 | DNA | L7-2E04 CDS |
| 707 | DNA | L7-2F04 CDS |
| 708 | DNA | L7-2H04 CDS |
| 709 | DNA | L7-2B05 CDS |
| 710 | DNA | L7-2D05 CDS |
| 711 | DNA | L7-2E05 CDS |
| 712 | DNA | L7-2F05 CDS |
| 713 | DNA | L7-2H05 CDS |
| 714 | DNA | L7-2A06 CDS |
| 715 | DNA | L7-2C06 CDS |
| 716 | DNA | L7-2D06 CDS |
| 717 | DNA | L7-2F06 CDS |
| 718 | DNA | L7-2G06 CDS |
| 719 | DNA | L7-2A07 CDS |
| 720 | DNA | L7-2B07 CDS |
| 721 | DNA | L7-2C07 CDS |
| 722 | DNA | L7-2D07 CDS |
| 723 | DNA | L7-2E07 CDS |
| 724 | DNA | L7-2G07 CDS |
| 725 | DNA | L7-2B08 CDS |
| 726 | DNA | L7-2D08 CDS |
| 727 | DNA | L7-2F08 CDS |
| 728 | DNA | L7-2G08 CDS |
| 729 | DNA | L7-2B09 CDS |
| 730 | DNA | L7-2C09 CDS |
| 731 | DNA | L7-2E09 CDS |
| 732 | DNA | L7-2B10 CDS |
| 733 | DNA | L7-2E10 CDS |
| 734 | DNA | L7-2G10 CDS |
| 735 | DNA | L7-2C11 CDS |
| 736 | DNA | L7-2D11 CDS |
| 737 | DNA | L7-2F11 CDS |
| 738 | DNA | L7-2G11 CDS |
| 739 | DNA | L7-2B12 CDS |
| 740 | DNA | L7-2C12 CDS |
| 741 | DNA | L7-2D12 CDS |
| 742 | DNA | L7-2F12 CDS |
| 743 | DNA | L7-2G12 CDS |
| 744 | DNA | L7-3A01 CDS |
| 745 | DNA | L7-3C01 CDS |
| 746 | DNA | L7-3G01 CDS |
| 747 | DNA | L7-3H01 CDS |
| 748 | DNA | L7-3A02 CDS |
| 749 | DNA | L7-3B02 CDS |
| 750 | DNA | L7-3D02 CDS |
| 751 | DNA | L7-3G02 CDS |
| 752 | DNA | L7-3H02 CDS |
| 753 | DNA | L7-3B03 CDS |
| 754 | DNA | L7-3C03 CDS |
| 755 | DNA | L7-3E03 CDS |
| 756 | DNA | L7-3G03 CDS |
| 757 | DNA | L7-3H03 CDS |
| 758 | DNA | L7-3B04 CDS |
| 759 | DNA | L7-3E04 CDS |
| 760 | DNA | L7-3G04 CDS |
| 761 | DNA | L7-3A05 CDS |
| 762 | DNA | L7-3B05 CDS |
| 763 | DNA | L7-3H05 CDS |
| 764 | DNA | L7-3B06 CDS |
| 765 | DNA | L7-3D06 CDS |
| 766 | DNA | L7-3E06 CDS |
| 767 | DNA | L7-3A07 CDS |
| 768 | DNA | L7-3C07 CDS |
| 769 | DNA | L7-3F07 CDS |
| 770 | DNA | L7-3A08 CDS |
| 771 | DNA | L7-3B08 CDS |
| 772 | DNA | L7-3C08 CDS |
| 773 | DNA | L7-3F08 CDS |
| 774 | DNA | L7-3G08 CDS |
| 775 | DNA | L7-3B09 CDS |
| 776 | DNA | L7-3F09 CDS |
| 777 | DNA | L7-3A10 CDS |
| 778 | DNA | L7-3B10 CDS |
| 779 | DNA | L7-3C10 CDS |
| 780 | DNA | L7-3G10 CDS |
| 781 | DNA | L7-3A11 CDS |
| 782 | DNA | L7-3C11 CDS |
| 783 | DNA | L7-3E11 CDS |
| 784 | DNA | L7-3G11 CDS |
| 785 | DNA | L7-3A12 CDS |
| 786 | DNA | L7-3B12 CDS |
| 787 | DNA | L7-3C12 CDS |
| 788 | DNA | L7-3E12 CDS |
| 789 | DNA | L7-3F12 CDS |
| 790 | DNA | L7-3G12 CDS |
| 791 | DNA | L7-4A01 CDS |
| 792 | DNA | L7-4A03 CDS |
| 793 | DNA | L7-4A04 CDS |
| 794 | DNA | L7-4A06 CDS |
| 795 | DNA | L7-4A08 CDS |
| 796 | DNA | L7-4A09 CDS |
| 797 | DNA | L7-4A12 CDS |
| 798 | DNA | L7-4B03 CDS |
| 799 | DNA | L7-4B04 CDS |
| 800 | DNA | L7-4B06 CDS |
| 801 | DNA | L7-4B07 CDS |
| 802 | DNA | L7-4C01 CDS |
| 803 | DNA | L7-4C03 CDS |
| 804 | DNA | L7-4C04 CDS |
| 805 | DNA | L7-4C06 CDS |
| 806 | DNA | L7-4C09 CDS |
| 807 | DNA | L7-4C12 CDS |
| 808 | DNA | L7-4D04 CDS |
| 809 | DNA | L7-4D07 CDS |
| 810 | DNA | L7-4D08 CDS |
| 811 | DNA | L7-4D10 CDS |
| 812 | DNA | L7-4D11 CDS |
| 813 | DNA | L7-4E01 CDS |
| 814 | DNA | L7-4E02 CDS |
| 815 | DNA | L7-4E04 CDS |
| 816 | DNA | L7-4E05 CDS |
| 817 | DNA | L7-4E07 CDS |
| 818 | DNA | L7-4E08 CDS |
| 819 | DNA | L6-3A09 CDS |
| 820 | DNA | L7-4C06 (E03) CDS |
| 821 | DNA | L10-84 (B12) CDS |
| 822 | DNA | L13-2-46 (D10) CDS |
| 823 | DNA | L12-1-10 CDS |
| 824 | DNA | L13-2-23 CDS |
| 825 | DNA | L7-1C3-A5 |
| 826 | DNA | L7-1F8-A11 |
| 827 | DNA | L7-1G6-B2 |
| 828 | DNA | L7-3E3-D1 |
| 829 | DNA | L1-18 CDS |
| 830 | DNA | L1-21 CDS |
| 831 | DNA | L1-25 CDS |
| 832 | DNA | L1-33 CDS |
| 833 | DNA | L1-34 CDS |
| 834 | DNA | L1-36 CDS |
| 835 | DNA | L1-39 CDS |
| 836 | DNA | L1-41 CDS |
| 841 | DNA | Plasmid PHP37586A |
| 842 | DNA | Plasmid PHP37587A |
| 843 | DNA | Plasmid PHP37588A |
| 844 | DNA | Plasmid PHP37589A |
| 845 | DNA | Plasmid PHP39389A |
| 846 | DNA | Plasmid PHP39390A |
| 847 | DNA | Construct containing |
| | | artificial microRNA |
| 848 | DNA | Tet operator sequence |
| 863 | AA | L13-23 |
| 864 | AA | L15-20 |
| 865 | AA | L15-20-M4 |
| 866 | AA | L15-20-M9 |
| 867 | AA | L15-20-M34 |
| 868 | AA | CsL4.2-20 having the |
| | | L17G mutation |
| 869 | AA | CsL4.2-15 |
| 870 | AA | CsL4.2-20 |
| 884 | AA | L13-23 having the L17G |
| | | mutation |
| 885 | AA | L15-20 having the L17G |
| | | mutation |
| 886 | AA | L15-20-M4 having the |
| | | L17G mutation |
| 887 | AA | L15-20-M9 having the |
| | | L17G mutation |
| 888 | AA | L15-20-M34 having the |
| | | L17G mutation |
| 889 | AA | CsL4.2-15 having the |
| | | L17G mutation |
| 1193 | DNA | L10-11(A04) |
| 1194 | DNA | L10-13(A05) |
| 1195 | DNA | L10-15(A06) |
| 1196 | DNA | L10-30(A09) |
| 1197 | DNA | L10-35(A11) |
| 1198 | DNA | L10-46(B02) |
| 1199 | DNA | L10-47(B03) |
| 1200 | DNA | L10-54(B06) |
| 1201 | DNA | L10-55(B07) |
| 1202 | DNA | L10-59(B08) |
| 1203 | DNA | L10-72(B10) |
| 1204 | DNA | L10-84(B12) |
| 1205 | DNA | L10-90(C02) |
| 1206 | DNA | L11-17(C06) |
| 1207 | DNA | L11-53(C09) |
| 1208 | DNA | L12-1-03 |
| 1209 | DNA | L12-1-06 |
| 1210 | DNA | L12-1-09 |
| 1211 | DNA | L12-1-10 |
| 1212 | DNA | L12-1-11 |
| 1213 | DNA | L12-1-12 |
| 1214 | DNA | L12-1-16 |
| 1215 | DNA | L12-1-17 |
| 1216 | DNA | L12-1-19 |
| 1217 | DNA | L12-1-20 |
| 1218 | DNA | L12-1-21 |
| 1219 | DNA | L12-1-22 |
| 1220 | DNA | L12-2-13 |
| 1221 | DNA | L12-2-14 |
| 1222 | DNA | L12-2-15 |
| 1223 | DNA | L12-2-20 |
| 1224 | DNA | L12-2-22 |
| 1225 | DNA | L12-2-23 |
| 1226 | DNA | L12-2-27 |
| 1227 | DNA | L12-2-33 |
| 1228 | DNA | L12-2-39 |
| 1229 | DNA | L12-2-48 |
| 1230 | DNA | L12-2-49 |
| 1231 | DNA | L12-2-50 |
| 1232 | DNA | L13-1-01 |
| 1233 | DNA | L13-1-02 |
| 1234 | DNA | L13-1-03 |
| 1235 | DNA | L13-1-04 |
| 1236 | DNA | L13-1-05 |
| 1237 | DNA | L13-1-06 |
| 1238 | DNA | L13-1-07 |
| 1239 | DNA | L13-1-08 |
| 1240 | DNA | L13-1-09 |
| 1241 | DNA | L13-1-10 |
| 1242 | DNA | L13-1-11 |
| 1243 | DNA | L13-1-12 |
| 1244 | DNA | L13-1-13 |
| 1245 | DNA | L13-1-14 |
| 1246 | DNA | L13-1-15 |
| 1247 | DNA | L13-1-16 |
| 1248 | DNA | L13-1-17 |
| 1249 | DNA | L13-1-18 |
| 1250 | DNA | L13-1-19 |
| 1251 | DNA | L13-1-20 |
| 1252 | DNA | L13-1-21 |
| 1253 | DNA | L13-1-22 |
| 1254 | DNA | L13-1-23 |
| 1255 | DNA | L13-1-24 |
| 1256 | DNA | L13-1-25 |
| 1257 | DNA | L13-1-26 |
| 1258 | DNA | L13-1-27 |
| 1259 | DNA | L13-1-28 |
| 1260 | DNA | L13-1-29 |
| 1261 | DNA | L13-1-30 |
| 1262 | DNA | L13-1-31 |
| 1263 | DNA | L13-1-32 |
| 1264 | DNA | L13-1-33 |
| 1265 | DNA | L13-1-34 |
| 1266 | DNA | L13-1-35 |
| 1267 | DNA | L13-1-36 |
| 1268 | DNA | L13-1-37 |
| 1269 | DNA | L13-1-38 |
| 1270 | DNA | L13-1-39 |
| 1271 | DNA | L13-1-40 |
| 1272 | DNA | L13-1-41 |
| 1273 | DNA | L13-1-42 |
| 1274 | DNA | L13-1-43 |
| 1275 | DNA | L13-1-44 |
| 1276 | DNA | L13-1-45 |
| 1277 | DNA | L13-1-47 |
| 1278 | DNA | L13-1-48 |
| 1279 | DNA | L13-2-13 |
| 1280 | DNA | L13-2-14 |
| 1281 | DNA | L13-2-15 |
| 1282 | DNA | L13-2-16 |
| 1283 | DNA | L13-2-17 |
| 1284 | DNA | L13-2-18 |
| 1285 | DNA | L13-2-19 |
| 1286 | DNA | L13-2-20 |
| 1287 | DNA | L13-2-21 |
| 1288 | DNA | L13-2-22 |
| 1289 | DNA | L13-2-23 |
| 1290 | DNA | L13-2-24 |
| 1291 | DNA | L13-2-27 |
| 1292 | DNA | L13-2-28 |
| 1293 | DNA | L13-2-29 |
| 1294 | DNA | L13-2-30 |
| 1295 | DNA | L13-2-31 |
| 1296 | DNA | L13-2-32 |
| 1297 | DNA | L13-2-33 |
| 1298 | DNA | L13-2-34 |
| 1299 | DNA | L13-2-35 |
| 1300 | DNA | L13-2-36 |
| 1301 | DNA | L13-2-38 |
| 1302 | DNA | L13-2-39 |
| 1303 | DNA | L13-2-40 |
| 1304 | DNA | L13-2-41 |
| 1305 | DNA | L13-2-42 |
| 1306 | DNA | L13-2-43 |
| 1307 | DNA | L13-2-44 |
| 1308 | DNA | L13-2-45 |
| 1309 | DNA | L13-2-46 |
| 1310 | DNA | L13-2-47 |
| 1311 | DNA | L13-2-48 |
| 1312 | DNA | L13-2-51 |
| 1313 | DNA | L13-2-52 |
| 1314 | DNA | L13-2-53 |
| 1315 | DNA | L13-2-54 |
| 1316 | DNA | L13-2-55 |
| 1317 | DNA | L13-2-56 |
| 1318 | DNA | L13-2-57 |
| 1319 | DNA | L13-2-58 |
| 1320 | DNA | L13-2-59 |
| 1321 | DNA | L13-2-60 |
| 1322 | DNA | L13-2-61 |
| 1323 | DNA | L13-2-62 |
| 1324 | DNA | L13-2-63 |
| 1325 | DNA | L13-2-64 |
| 1326 | DNA | L13-2-65 |
| 1327 | DNA | L13-2-66 |
| 1328 | DNA | L13-2-67 |
| 1329 | DNA | L13-2-68 |
| 1330 | DNA | L13-2-69 |
| 1331 | DNA | L13-2-70 |
| 1332 | DNA | L13-2-71 |
| 1333 | DNA | L13-2-72 |
| 1334 | DNA | L13-2-73 |
| 1335 | DNA | L13-2-74 |
| 1336 | DNA | L13-2-75 |
| 1337 | DNA | L15-01 |
| 1338 | DNA | L15-02 |
| 1339 | DNA | L15-03 |
| 1340 | DNA | L15-04 |
| 1341 | DNA | L15-05 |
| 1342 | DNA | L15-06 |
| 1343 | DNA | L15-07 |
| 1344 | DNA | L15-08 |
| 1345 | DNA | L15-10 |
| 1346 | DNA | L15-11 |
| 1347 | DNA | L15-12 |
| 1348 | DNA | L15-13 |
| 1349 | DNA | L15-14 |
| 1350 | DNA | L15-15 |
| 1351 | DNA | L15-16 |
| 1352 | DNA | L15-17 |
| 1353 | DNA | L15-18 |
| 1354 | DNA | L15-19 |
| 1355 | DNA | L15-20 |
| 1356 | DNA | L15-21 |
| 1357 | DNA | L15-22 |
| 1358 | DNA | L15-23 |
| 1359 | DNA | L15-25 |
| 1360 | DNA | L15-26 |
| 1361 | DNA | L15-27 |
| 1362 | DNA | L15-28 |
| 1363 | DNA | L15-29 |
| 1364 | DNA | L15-30 |
| 1365 | DNA | L15-31 |
| 1366 | DNA | L15-32 |
| 1367 | DNA | L15-33 |
| 1368 | DNA | L15-34 |
| 1369 | DNA | L15-35 |
| 1370 | DNA | L15-36 |
| 1371 | DNA | L15-37 |
| 1372 | DNA | L15-38 |
| 1373 | DNA | L15-39 |
| 1374 | DNA | L15-40 |
| 1375 | DNA | L15-41 |
| 1376 | DNA | L15-42 |
| 1377 | DNA | L15-43 |
| 1378 | DNA | L15-44 |
| 1379 | DNA | L15-45 |
| 1380 | DNA | L15-46 |
| 1381 | AA | L10-11(A04) |
| 1382 | AA | L10-13(A05) |
| 1383 | AA | L10-15(A06) |
| 1384 | AA | L10-30(A09) |
| 1385 | AA | L10-35(A11) |
| 1386 | AA | L10-46(B02) |
| 1387 | AA | L10-47(B03) |
| 1388 | AA | L10-54(B06) |
| 1389 | AA | L10-55(B07) |
| 1390 | AA | L10-59(B08) |
| 1391 | AA | L10-72(B10) |
| 1392 | AA | L10-84(B12) |
| 1393 | AA | L10-90(C02) |
| 1394 | AA | L11-17(C06) |
| 1395 | AA | L11-53(C09) |
| 1396 | AA | L12-1-03 |
| 1397 | AA | L12-1-06 |
| 1398 | AA | L12-1-09 |
| 1399 | AA | L12-1-10 |
| 1400 | AA | L12-1-11 |
| 1401 | AA | L12-1-12 |
| 1402 | AA | L12-1-16 |
| 1403 | AA | L12-1-17 |
| 1404 | AA | L12-1-19 |
| 1405 | AA | L12-1-20 |
| 1406 | AA | L12-1-21 |
| 1407 | AA | L12-1-22 |
| 1408 | AA | L12-2-13 |
| 1409 | AA | L12-2-14 |
| 1410 | AA | L12-2-15 |
| 1411 | AA | L12-2-20 |
| 1412 | AA | L12-2-22 |
| 1413 | AA | L12-2-23 |
| 1414 | AA | L12-2-27 |
| 1415 | AA | L12-2-33 |
| 1416 | AA | L12-2-39 |
| 1417 | AA | L12-2-48 |
| 1418 | AA | L12-2-49 |
| 1419 | AA | L12-2-50 |
| 1420 | AA | L13-1-01 |
| 1421 | AA | L13-1-02 |
| 1422 | AA | L13-1-03 |
| 1423 | AA | L13-1-04 |
| 1424 | AA | L13-1-05 |
| 1425 | AA | L13-1-06 |
| 1426 | AA | L13-1-07 |
| 1427 | AA | L13-1-08 |
| 1428 | AA | L13-1-09 |
| 1429 | AA | L13-1-10 |
| 1430 | AA | L13-1-11 |
| 1431 | AA | L13-1-12 |
| 1432 | AA | L13-1-13 |
| 1433 | AA | L13-1-14 |
| 1434 | AA | L13-1-15 |
| 1435 | AA | L13-1-16 |
| 1436 | AA | L13-1-17 |
| 1437 | AA | L13-1-18 |
| 1438 | AA | L13-1-19 |
| 1439 | AA | L13-1-20 |
| 1440 | AA | L13-1-21 |
| 1441 | AA | L13-1-22 |
| 1442 | AA | L13-1-23 |
| 1443 | AA | L13-1-24 |
| 1444 | AA | L13-1-25 |
| 1445 | AA | L13-1-26 |
| 1446 | AA | L13-1-27 |
| 1447 | AA | L13-1-28 |
| 1448 | AA | L13-1-29 |
| 1449 | AA | L13-1-30 |
| 1450 | AA | L13-1-31 |
| 1451 | AA | L13-1-32 |
| 1452 | AA | L13-1-33 |
| 1453 | AA | L13-1-34 |
| 1454 | AA | L13-1-35 |
| 1455 | AA | L13-1-36 |
| 1456 | AA | L13-1-37 |
| 1457 | AA | L13-1-38 |
| 1458 | AA | L13-1-39 |
| 1459 | AA | L13-1-40 |
| 1460 | AA | L13-1-41 |
| 1461 | AA | L13-1-42 |
| 1462 | AA | L13-1-43 |
| 1463 | AA | L13-1-44 |
| 1464 | AA | L13-1-45 |
| 1465 | AA | L13-1-47 |
| 1466 | AA | L13-1-48 |
| 1467 | AA | L13-2-13 |
| 1468 | AA | L13-2-14 |
| 1469 | AA | L13-2-15 |
| 1470 | AA | L13-2-16 |
| 1471 | AA | L13-2-17 |
| 1472 | AA | L13-2-18 |
| 1473 | AA | L13-2-19 |
| 1474 | AA | L13-2-20 |
| 1475 | AA | L13-2-21 |
| 1476 | AA | L13-2-22 |
| 1477 | AA | L13-2-23 |
| 1478 | AA | L13-2-24 |
| 1479 | AA | L13-2-27 |
| 1480 | AA | L13-2-28 |
| 1481 | AA | L13-2-29 |
| 1482 | AA | L13-2-30 |
| 1483 | AA | L13-2-31 |
| 1484 | AA | L13-2-32 |
| 1485 | AA | L13-2-33 |
| 1486 | AA | L13-2-34 |
| 1487 | AA | L13-2-35 |
| 1488 | AA | L13-2-36 |
| 1489 | AA | L13-2-38 |
| 1490 | AA | L13-2-39 |
| 1491 | AA | L13-2-40 |
| 1492 | AA | L13-2-41 |
| 1493 | AA | L13-2-42 |
| 1494 | AA | L13-2-43 |
| 1495 | AA | L13-2-44 |
| 1496 | AA | L13-2-45 |
| 1497 | AA | L13-2-46 |
| 1498 | AA | L13-2-47 |
| 1499 | AA | L13-2-48 |
| 1500 | AA | L13-2-51 |
| 1501 | AA | L13-2-52 |
| 1502 | AA | L13-2-53 |
| 1503 | AA | L13-2-54 |
| 1504 | AA | L13-2-55 |
| 1505 | AA | L13-2-56 |
| 1506 | AA | L13-2-57 |
| 1507 | AA | L13-2-58 |
| 1508 | AA | L13-2-59 |
| 1509 | AA | L13-2-60 |
| 1510 | AA | L13-2-61 |
| 1511 | AA | L13-2-62 |
| 1512 | AA | L13-2-63 |
| 1513 | AA | L13-2-64 |
| 1514 | AA | L13-2-65 |
| 1515 | AA | L13-2-66 |
| 1516 | AA | L13-2-67 |
| 1517 | AA | L13-2-68 |
| 1518 | AA | L13-2-69 |
| 1519 | AA | L13-2-70 |
| 1520 | AA | L13-2-71 |
| 1521 | AA | L13-2-72 |
| 1522 | AA | L13-2-73 |
| 1523 | AA | L13-2-74 |
| 1524 | AA | L13-2-75 |
| 1525 | AA | L15-01 |
| 1526 | AA | L15-02 |
| 1527 | AA | L15-03 |
| 1528 | AA | L15-04 |
| 1529 | AA | L15-05 |
| 1530 | AA | L15-06 |
| 1531 | AA | L15-07 |
| 1532 | AA | L15-08 |
| 1533 | AA | L15-10 |
| 1534 | AA | L15-11 |
| 1535 | AA | L15-12 |
| 1536 | AA | L15-13 |
| 1537 | AA | L15-14 |
| 1538 | AA | L15-15 |
| 1539 | AA | L15-16 |
| 1540 | AA | L15-17 |
| 1541 | AA | L15-18 |
| 1542 | AA | L15-19 |
| 1543 | AA | L15-20 |
| 1544 | AA | L15-21 |
| 1545 | AA | L15-22 |
| 1546 | AA | L15-23 |
| 1547 | AA | L15-25 |
| 1548 | AA | L15-26 |
| 1549 | AA | L15-27 |
| 1550 | AA | L15-28 |
| 1551 | AA | L15-29 |
| 1552 | AA | L15-30 |
| 1553 | AA | L15-31 |
| 1554 | AA | L15-32 |
| 1555 | AA | L15-33 |
| 1556 | AA | L15-34 |
| 1557 | AA | L15-35 |
| 1558 | AA | L15-36 |
| 1559 | AA | L15-37 |
| 1560 | AA | L15-38 |
| 1561 | AA | L15-39 |
| 1562 | AA | L15-40 |
| 1563 | AA | L15-41 |
| 1564 | AA | L15-42 |
| 1565 | AA | L15-43 |
| 1566 | AA | L15-44 |
| 1567 | AA | L15-45 |
| 1568 | AA | L15-46 |
| 1949 | DNA | L8-1A03 |
| 1950 | DNA | L8-1A04 |
| 1951 | DNA | L8-1A05 |
| 1952 | DNA | L8-1A06 |
| 1953 | DNA | L8-1B12 |
| 1954 | DNA | L8-1C02 |
| 1955 | DNA | L8-1C09 |
| 1956 | DNA | L8-1D03 |
| 1957 | DNA | L8-1D11 |
| 1958 | DNA | L8-1E02 |
| 1959 | DNA | L8-1E04 |
| 1960 | DNA | L8-2A08 |
| 1961 | DNA | L8-2B05 |
| 1962 | DNA | L8-2F04 |
| 1963 | DNA | L8-2F10 |
| 1964 | DNA | L8-2F12 |
| 1965 | DNA | L8-2H01 |
| 1966 | DNA | L8-3A04 |
| 1967 | DNA | L8-3A05 |
| 1968 | DNA | L8-3A06 |
| 1969 | DNA | L8-3A07 |
| 1970 | DNA | L8-3A10 |
| 1971 | DNA | L8-3A12 |
| 1972 | DNA | L8-3B02 |
| 1973 | DNA | L8-3B03 |
| 1974 | DNA | L8-3B05 |
| 1975 | DNA | L8-3B08 |
| 1976 | DNA | L8-3B09 |
| 1977 | DNA | L8-3D03 |
| 1978 | DNA | L8-3D04 |
| 1979 | DNA | L8-3D12 |
| 1980 | DNA | L8-3E05 |
| 1981 | DNA | L8-3E09 |
| 1982 | DNA | L8-3F01 |
| 1983 | DNA | L8-3F02 |
| 1984 | DNA | L8-3F06 |
| 1985 | DNA | L8-3F08 |
| 1986 | DNA | L8-3F09 |
| 1987 | DNA | CsL3-1A07 |
| 1988 | DNA | CsL3-1B04 |
| 1989 | DNA | CsL3-1B05 |
| 1990 | DNA | CsL3-1B11 |
| 1991 | DNA | CsL3-1C01 |
| 1992 | DNA | CsL3-1C12 |
| 1993 | DNA | CsL3-2A01 |
| 1994 | DNA | CsL3-2B06 |
| 1995 | DNA | CsL3-2B09 |
| 1996 | DNA | CsL3-2B12 |
| 1997 | DNA | CsL3-2D02 |
| 1998 | DNA | CsL3-2D10 |
| 1999 | DNA | CsL3-2D11 |
| 2000 | DNA | CsL3-2D12 |
| 2001 | DNA | CsL3-2E07 |
| 2002 | DNA | CsL3-2E08 |
| 2003 | DNA | CsL3-2E09 |
| 2004 | DNA | CsL3-2E10 |
| 2005 | DNA | CsL3-2E11 |
| 2006 | DNA | CsL3-2E12 |
| 2007 | DNA | CsL3-MTZ2 |
| 2008 | DNA | CsL3-MTZ3 |
| 2009 | DNA | CsL3-MTZ4 |
| 2010 | DNA | CsL3-MTZ5 |
| 2011 | DNA | CsL4.2-01 |
| 2012 | DNA | CsL4.2-04 |
| 2013 | DNA | CsL4.2-07 |
| 2014 | DNA | CsL4.2-08 |
| 2015 | DNA | CsL4.2-11 |
| 2016 | DNA | CsL4.2-12 |
| 2017 | DNA | CsL4.2-15 |
| 2018 | DNA | CsL4.2-16 |
| 2019 | DNA | CsL4.2-17 |
| 2020 | DNA | CsL4.2-18 |
| 2021 | DNA | CsL4.2-20 |
| 2022 | DNA | CsL4.2-21 |
| 2023 | DNA | CsL4.2-22 |
| 2024 | DNA | CsL4.2-23 |
| 2025 | DNA | CsL4.2-24 |
| 2026 | DNA | CsL4.2-26 |
| 2027 | DNA | CsL4.2-27 |
| 2028 | DNA | CsL4.2-28 |
| 2029 | DNA | CsL4.2-30 |
| 2030 | AA | L8-1A03 |
| 2031 | AA | L8-1A04 |
| 2032 | AA | L8-1A05 |
| 2033 | AA | L8-1A06 |
| 2034 | AA | L8-1B12 |
| 2035 | AA | L8-1C02 |
| 2036 | AA | L8-1C09 |
| 2037 | AA | L8-1D03 |
| 2038 | AA | L8-1D11 |
| 2039 | AA | L8-1E02 |
| 2040 | AA | L8-1E04 |
| 2041 | AA | L8-2A08 |
| 2042 | AA | L8-2B05 |
| 2043 | AA | L8-2F04 |
| 2044 | AA | L8-2F10 |
| 2045 | AA | L8-2F12 |
| 2046 | AA | L8-2H01 |
| 2047 | AA | L8-3A04 |
| 2048 | AA | L8-3A05 |
| 2049 | AA | L8-3A06 |
| 2050 | AA | L8-3A07 |
| 2051 | AA | L8-3A10 |
| 2052 | AA | L8-3A12 |
| 2053 | AA | L8-3B02 |
| 2054 | AA | L8-3B03 |
| 2055 | AA | L8-3B05 |
| 2056 | AA | L8-3B08 |
| 2057 | AA | L8-3B09 |
| 2058 | AA | L8-3D03 |
| 2059 | AA | L8-3D04 |
| 2060 | AA | L8-3D12 |
| 2061 | AA | L8-3E05 |
| 2062 | AA | L8-3E09 |
| 2063 | AA | L8-3F01 |
| 2064 | AA | L8-3F02 |
| 2065 | AA | L8-3F06 |
| 2066 | AA | L8-3F08 |
| 2067 | AA | L8-3F09 |
| 2068 | AA | CsL3-1A07 |
| 2069 | AA | CsL3-1B04 |
| 2070 | AA | CsL3-1B05 |
| 2071 | AA | CsL3-1B11 |
| 2072 | AA | CsL3-1C01 |
| 2073 | AA | CsL3-1C12 |
| 2074 | AA | CsL3-2A01 |
| 2075 | AA | CsL3-2B06 |
| 2076 | AA | CsL3-2B09 |
| 2077 | AA | CsL3-2B12 |
| 2078 | AA | CsL3-2D02 |
| 2079 | AA | CsL3-2D10 |
| 2080 | AA | CsL3-2D11 |
| 2081 | AA | CsL3-2D12 |
| 2082 | AA | CsL3-2E07 |
| 2083 | AA | CsL3-2E08 |
| 2084 | AA | CsL3-2E09 |
| 2085 | AA | CsL3-2E10 |
| 2086 | AA | CsL3-2E11 |
| 2087 | AA | CsL3-2E12 |
| 2088 | AA | CsL3-MTZ2 |
| 2089 | AA | CsL3-MTZ3 |
| 2090 | AA | CsL3-MTZ4 |
| 2091 | AA | CsL3-5 |
| 2092 | AA | CsL4.2-01 |
| 2093 | AA | CsL4.2-04 |
| 2094 | AA | CsL4.2-07 |
| 2095 | AA | CsL4.2-08 |
| 2096 | AA | CsL4.2-11 |
| 2097 | AA | CsL4.2-12 |
| 2098 | AA | CsL4.2-15 |
| 2099 | AA | CsL4.2-16 |
| 2100 | AA | CsL4.2-17 |
| 2101 | AA | CsL4.2-18 |
| 2102 | AA | CsL4.2-20 |
| 2103 | AA | CsL4.2-21 |
| 2104 | AA | CsL4.2-22 |
| 2105 | AA | CsL4.2-23 |
| 2106 | AA | CsL4.2-24 |
| 2107 | AA | CsL4.2-26 |
| 2108 | AA | CsL4.2-27 |
| 2109 | AA | CsL4.2-28 |
| 2110 | AA | CsL4.2-30 |
| 2111 | DNA | PHP46916 |
| 2112 | DNA | PHP46864 |
| 2113 | DNA | PHP1194 |
| 2114 | DNA | PHP1195 |
| 2115 | DNA | PHP1196 |
| 2116 | DNA | PHP1197 |
| 2117 | DNA | PHP1198 |
| 2118 | DNA | PHP1199 |

[0289] The following examples are provided to illustrate some embodiments of the invention, but should not be construed as defining or otherwise limiting any aspect, embodiment, element or any combinations thereof. Modifications of any aspect, embodiment, element or any combinations thereof are apparent to a person of skill in the art.

### EXPERIMENTAL

### Example 1

### Use of a Sulfonylurea Repressor Controlled siRNA Targeted Against the Sulfonylurea Repressor for Amplification and Increased Spatial Distribution of Induced Signal

[0290] One of the main limitations of any chemically inducible system in multicellular organisms is the penetration and even distribution of the inducer throughout all tissues (due to variable movement or metabolism). The result is the possibility of uneven (or lack of) targeted gene induction in the tissues or cell types of interest. To address this potential caveat, it is desired to provide additional genetic factors to effect the spread of de-repression. siRNA's have been used extensively in eukaryotic systems to knockdown targeted gene expression. In particular plants have the added potential that the siRNA response can go systemic (Palauqui et al. (1997) EMBO J. 16: 4738-4745; Voinnet et al. (1997) Nature 389: 553) depending on the type of silencing signal generated (Felipe Fenselau de Felippes et al. (2010) Nucleic Acids Research 1-10).

[0291] Thus a well suited approach for enhancing spatial spread of signal in plants using the SuR based switch is to control repressor transcript stability through de-repression of a mobile siRNA generating signal targeted against any or all parts of the transcript harboring the repressor coding region. Auto-inducing regulating repressor expression thru siRNA has been demonstrated in mammalian cell cultures (Greber et al. (2008) Nucleic Acids Research 36: 16). In the above example, it was shown that induction of an siRNA against the repressor greatly extended the time period of the induced state following removal of ligand. However, this study was limited to tissue culture cells and not extended to a whole animal model where the inducer is unlikely to contact all cell types following administration. Furthermore, unlike plants, higher animals are not known to communicate siRNA signals systemically and thus the aspect of enhancing induction spatially may not translate to animal systems.

[0292] This method can be tested by adding to the SU switch, as exemplified in FIG. 1, an expression cassette having a tetO controlled promoter linked to an siRNA that is targeted to the repressor transcript (siRNA^{rep}; FIG. 2). Because siRNA^{rep} can lead to systemic spread of the silencing signal, de-repression would spread well beyond the bounds of the inducer. The cell non-autonomous feature of this method thus clearly differentiates it over other possible techniques to extend and intensify de-repression.

[0293] To test this principle, inducible lines of tobacco harboring constructs shown in FIG. 4 were created. A summary of the constructs shown in FIG. 4 is provided below in table 29. All vectors contain a right border (RB) proximal 35S::3xtetO-DsRED-UBQ3 inducible reporter cassette, a 35S::1xtetO-EsR(L13-32)-UBQ14 repressor cassette, and a SAMS-HRA-ALS left border (LB) proximal selectable marker. Inserted either upstream (pHD1194-1196) or downstream (pHD1196-1199) of the repressor cassette are MMV::3xOp-siRNA^{rep}-Pin2 cassettes composed of an inverted repeat of the full length repressor coding region (no ATG-pHD1194 and 1197) or limited to the 5′ (pHD1195 & 1198) or 3′ (pHD1196 & 1199) halves of the SU repressor coding region linked by an intron spacer region. The MMV::tetO promoter was chosen so as not to cause silencing of the 35S::tetO promoter controlling target transgene expression. In this particular example the spacer region is the potato ST-LS1 gene intron IV2 (Construction of an intron-containing marker gene: splicing of the intron in transgenic plants and its use in monitoring early events in Agrobacterium-mediated plant transformation. Vancanneyt et al. (1990) Mol Gen Genet. 220(2):245-50). The vectors were transferred to A. tumefaciens EHA105 and transformed into leaf explants of wild type Nicotiana tabacum via Agrobacterium co-cultivation followed by selection for the presence of the HRA marker gene on 50 ppb imazapyr (inhibitor of acetolactate synthase but non-inducer of the SuR system). Duplicate excised leaf disks from each transformant were screened for controlled dsRED gene expression in the absence and presence of inducer Ethametsulfuron-methyl at 50 ppb (FIG. 5). T1 seeds from each of the inducible events were allowed to germinate and on filter paper contacting 0.5xMS agar with 1 ppm Ethametsulfuron. Nine fully derepressed DsRED positive seedings for each event were then transplanted into soil and their fluorescence phenotype monitored thru the four leaf developmental stage. Inducible tobacco events harboring pHD1180 (isogenic to vectors pHD1194-1199 but without the siRNA cassette) were used as the controls. Results show that while the DsRED expression signal is modest and diminishes in pHD1180 events over time, the DsRED intensity level is high and remains so with time in lines containing the MMV::tetO-siRNA^{rep} cassette (FIG. 6).

[0294] In a second experiment T1 seed of auto-inducible line pHD1198-2 were planted in soil treated with water or a one-time application of 20 ml of Muster (commercial form of Ethametsulfuron-methyl—DuPont) made up to a 1/16^{th}× recommended spray rate concentration in water. The DsRED phenotype was then followed throughout the plants entire life cycle. The results show that DsRED is fully activated throughout the life span of the plant and in all tissues examined except pollen (35S promoter silent in pollen) in the Muster treated plant but silent in control plants treated only with water (FIG. 7). Most notably the DsRED phenotype persists all the way thru seed development.

TABLE 29

| Plasmid | Cassette | Element | Nt position in plasmid |
|---|---|---|---|
| pHD1194 (SEQ | cassette A | 35S::3xOp | 177-623 |
| ID NO: 2113) | | DsRED | 699-1373 |
| | | UBQ3 | 1392-2500 |
| | cassette B | MMV::3xOp | 2600-2929 |
| | | siRNA rep-FL | 2936-4273 |
| | | PinII | 4380-4690 |
| | cassette C | 35S::1xOp | 4697-5218 |
| | | EsR(L13-23) | 5219-5839 |
| | | UBQ14 | 5883-6784 |
| | cassette D | SAMS | 6906-8215 |
| | | HRA | 8216-10186 |
| | | ALS | 10187-10837 |
| pHD1195 (SEQ | cassette A | 35S::3xOp | 177-623 |
| ID NO: 2114) | | DsRED | 699-1373 |
| | | UBQ3 | 1392-2500 |
| | cassette B | MMV::3xOp | 2600-2929 |
| | | siRNA rep-5′ | 2936-3759 |
| | | PinII | 3766-4076 |
| | cassette C | 35S::1xOp | 4083-4604 |
| | | EsR(L13-23) | 4605-5225 |
| | | UBQ14 | 5269-6170 |
| | cassette D | SAMS | 6292-7601 |
| | | HRA | 7602-9572 |
| | | ALS | 9573-10223 |
| pHD1196 (SEQ | cassette A | 35S::3xOp | 177-623 |
| ID NO: 2115) | | DsRED | 699-1373 |
| | | UBQ3 | 1392-2500 |
| | cassette B | MMV::3xOp | 2600-2929 |
| | | siRNA rep-3′ | 2936-3755 |
| | | PinII | 3762-4072 |
| | cassette C | 35S::1xOp | 4079-4600 |
| | | EsR(L13-23) | 4601-5221 |
| | | UBQ14 | 5265-6166 |
| | cassette D | SAMS | 6288-7597 |
| | | HRA | 7598-9568 |
| | | ALS | 9569-10219 |
| phD1197 SEQ | cassette A | 35S::3xOp | 177-623 |
| ID NO: 2116) | | DsRED | 699-1373 |
| | | UBQ3 | 1392-2500 |
| | cassette B | 35S::1xOp | 2590-3111 |
| | | EsR(L13-23) | 3112-3732 |
| | | UBQ14 | 3776-4677 |
| | cassette C | MMV::3xOp | 4708-5037 |
| | | siRNA rep-FL | 5044-6481 |
| | | PinII | 6488-6798 |
| | cassette D | SAMS | 6922-8231 |
| | | HRA | 8232-10202 |
| | | ALS | 10203-10853 |
| phD1198 SEQ | cassette A | 35S::3xOp | 177-623 |
| ID NO: 2117) | | DsRED | 699-1373 |
| | | UBQ3 | 1392-2500 |
| | cassette B | 35S::1xOp | 2590-3111 |
| | | EsR(L13-23) | 3112-3732 |
| | | UBQ14 | 3776-4677 |
| | cassette C | MMV::3xOp | 4708-5037 |
| | | siRNA rep-5′ | 5044-5867 |
| | | PinII | 5874-6184 |
| | cassette D | SAMS | 6308-7617 |
| | | HRA | 7618-9588 |
| | | ALS | 9589-10239 |
| phD1199 SEQ | cassette A | 35S::3xOp | 177-623 |
| ID NO: 2118) | | DsRED | 699-1373 |
| | | UBQ3 | 1392-2500 |
| | cassette B | 35S::1xOp | 2590-3111 |
| | | EsR(L13-23) | 3112-3732 |
| | | UBQ14 | 3776-4677 |
| | cassette C | MMV::3xOp | 4708-5037 |
| | | siRNA rep-3′ | 5044-5863 |
| | | PinII | 5870-6180 |
| | cassette D | SAMS | 6304-7613 |
| | | HRA | 7614-9584 |
| | | ALS | 9585-10235 |

### Example 2

### Use of a Sulfonylurea Repressor Controlled miRNA Targeted Against the Sulfonylurea Repressor for Amplification and Increased Spatial Distribution of Induced Signal

[0295] To show that the presence of an amiRNA targeted against the repressor protein increases expression after induction two constructs were made. The first, a control construct, pPHP46916 (10,904 bp) (SEQ ID NO: 2111) contains the following cassettes: cassette A comprising a Glycine max s-adenosylmethionine promoter operably linked to the Glycine max acetolactate synthase gene with HrA mutations operably linked to a Glycine max acetolactate synthase terminator (this cassette serves as a selectable marker during plant transformation; position 81-4062); followed by cassette B comprising the T7 promoter operably linked to hygromycin phosphotransferase operably linked to a T7 terminator (which serves as a selectable marker in E. coli, positions 5448-6586); followed by cassette C comprising a cauliflower mosaic virus 35S promoter with three copies of the TET operator embedded operably linked to DS-RED Express that has the potato LS1 intron; operably linked to the cauliflower mosaic virus 35S terminator (position 6862-8455), followed by cassette D comprising the Glycine max elongation factor 1a2 promoter operably linked to the repressor protein ESR (L10-B7) operably linked to the nos terminator (position 8474-10893). The second, experimental construct, pPHP46864 (11,868 bp) (SEQ ID NO:2112) is exactly the same except embedded within the potato LS1 intron at the Mfe1 site is a 964 bp cassette containing the Glycine max microRNA precursor 159 containing a microRNA that targets the repressor protein. The microRNA precursor and the design procedure are explained in US 2011-0091975, the contents of which are herein incorporated by reference in its entirety.

TABLE 28

| Plasmid | Cassette | Element | Nt position in plasmid |
|---|---|---|---|
| pPHP46916 (SEQ | Cassette A | | 81-4062 |
| ID NO: 2111) | | Glycine max s-adenosylmethionine promoter | 81-1389 |
| | | Glycine max acetolactate synthase gene with | 1456-3411 |
| | | HrA mutations | |
| | | Glycine max acetolactate synthase terminator | 3412-4062 |
| | Cassette B | | 5448-6733 |
| | | T7 promoter operably linked to | 5448-5545 |
| | | hygromycin phosphotransferase | 5546-6586 |
| | | T7 terminator | 6587-6733 |
| | Cassette C | | 6862-8455 |
| | | cauliflower mosaic virus 35S promoter with | 6862-7378 |
| | | three copies of the TET operator | |
| | | DS-RED Express that has the potato LS1 | 7385-8251 |
| | | intron | |
| | | operably linked to the cauliflower mosaic | 8258-8455 |
| | | virus 35S terminator | |
| | cassette D | | 8474-10893 |
| | | Glycine max elongation factor 1a2 promoter | 8474-9974 |
| | | repressor protein ESR (L10-B7) | 9976-10596 |
| | | operably linked to the nos terminator | 10613-10893 |
| pPHP46864 (SEQ | Cassette A | | 74-4055 |
| ID NO: 2112) | | Glycine max s-adenosylmethionine promoter | 74-1382 |
| | | Glycine max acetolactate synthase gene with | 1449-3404 |
| | | HrA mutations | |
| | | Glycine max acetolactate synthase terminator | 3405-4055 |
| | Cassette B | | 5441-6726 |
| | | T7 promoter operably linked to | 5441-5538 |
| | | hygromycin phosphotransferase | 5539-6579 |
| | | T7 terminator | 6580-6726 |
| | Cassette C | | 6855-9412 |
| | | cauliflower mosaic virus 35S promoter with | 6855-7371 |
| | | three copies of the TET operator | |
| | | DS-RED Express that has the potato LS1 | 7378-9208 |
| | | intron and within the potato LS1 intron at the | |
| | | Mfe1 site is a 964 bp cassette containing the | |
| | | Glycine max microRNA precursor 159 | |
| | | containing a microRNA that targets the | |
| | | repressor protein | |
| | | operably linked to the cauliflower mosaic | 9215-9412 |
| | | virus 35S terminator | |
| | cassette D | | 9431-11850 |
| | | Glycine max elongation factor 1a2 promoter | 9431-10931 |
| | | repressor protein ESR (L10-B7) | 10933-11553 |
| | | operably linked to the nos terminator | 11570-11850 |

[0296] From both plasmids a fragment of DNA containing all of the described cassettes except for the bacterial selection was made and used to transform soybean as described in Example 3. Plants were selected and leaf discs were obtained at the T0 plant stage. The leaf discs were floated in tissue culture media with 0, 0.05 ppm or 0.5 ppm ethametsulfuron at room temperature for 3-4 days and observed under a fluorescent microscope. A range of phenotypes was observed in different genetically distinct events including events that were leaky (i.e., leaf discs showed DS-RED expression without induction) and leaf discs that were not able to be induced (i.e., leaf discs never showed DS-RED expression). However, among the leaf discs that were able to be induced the leaf discs from the experimental plants showed a smoother, more even pattern of expression.

[0297] T0 plants were allowed to mature and seed was collected. This T1 seed was imbibed with 1 ppm chlorsulfuron and planted in a growth chamber and examined under a fluorescent microscope at two weeks which is just as the first trifoliate is appearing. Some of the plants show DS-red positive. For the control plants examined there was no DS-red signal found in root, stem or cotyledon. For experimental plants there was a weak DS-red signal can only be observed in root, stem and an even weaker signal in the cotyledon. This shows that the presence of the amiRNA targeting the repressor increases both the intensity and the domain of the reporter.

[0298] Chlorsulfuron works best when part of a formulation. Because of that we used the commercial product Tevlar XP (which is 75% chlorsulfuron). T1 Seeds were planted and watered for about 10 days and then watered with at day 11 and day 14 with a 0.2 gram/liter Tevlar XP. At day 18 the plants were examined under a fluorescent microscope. In plants derived from the experimental plasmid, there was strong induction throughout the seedling except in the cotyledons while the plants derived from the control plasmid showed only a small amount of induction in the root. The plants were allowed to grow for an additional two weeks only being watered (no Tevlar) and experimental plants continued to show a strong pattern of induction throughout the plant as opposed to the control plants that showed little or no expression and only in roots. This shows that the presence of the amiRNA targeting the repressor increases both the intensity and the domain of the reporter.

### Example 3

### Production and Model System Transformation of Somatic Soybean Embryo Cultures with Soybean Expression Vectors and Plant Regeneration

### Culture Conditions:

[0299] Soybean embryogenic suspension cultures (cv. Jack) are maintained in 35 mL liquid medium SB196 (infra) on a rotary shaker, 150 rpm, 26° C. with cool white fluorescent lights on 16:8 hr day/night photoperiod at light intensity of 60-85 μE/m2/s. Cultures are subcultured every 7 days to two weeks by inoculating approximately 35 mg of tissue into 35 mL of fresh liquid SB196 (the preferred subculture interval is every 7 days).

[0300] Soybean embryogenic suspension cultures are transformed with the soybean expression plasmids by the method of particle gun bombardment (Klein et al., Nature 327:70 (1987)) using a DuPont Biolistic PDS1000/HE instrument (helium retrofit) for all transformations.

### Soybean Embryogenic Suspension Culture Initiation:

[0301] Soybean cultures are initiated twice each month with 5-7 days between each initiation. Pods with immature seeds from available soybean plants are picked 45-55 days after planting. Seeds are removed from the pods and placed into a sterilized magenta box. The soybean seeds are sterilized by shaking them for 15 min in a 5% Clorox solution with 1 drop of Ivory soap (i.e., 95 mL of autoclaved distilled water plus 5 mL Clorox and 1 drop of soap, mixed well). Seeds are rinsed using 2 1-liter bottles of sterile distilled water and those less than 4 mm are placed on individual microscope slides. The small end of the seed is cut and the cotyledons pressed out of the seed coat. When cultures are being prepared for production transformation, cotyledons are transferred to plates containing SB1 medium (25-30 cotyledons per plate). Plates are wrapped with fiber tape and are maintained at 26° C. with cool white fluorescent lights on 16:8 h day/night photoperiod at light intensity of 60-80 μE/m2/s for eight weeks, with a media change after 4 weeks. When cultures are being prepared for model system experiments, cotyledons are transferred to plates containing SB 199 medium (25-30 cotyledons per plate) for 2 weeks, and then transferred to SB1 for 2-4 weeks. Light and temperature conditions are the same as described above. After incubation on SB1 medium, secondary embryos are cut and placed into SB196 liquid media for 7 days.

### Preparation of DNA for Bombardment:

[0302] Either an intact plasmid or a DNA plasmid fragment containing the genes of interest and the selectable marker gene are used for bombardment. Fragments from soybean expression plasmids are obtained by gel isolation of digested plasmids. In each case, 100 μg of plasmid DNA is used in 0.5 mL of the specific enzyme mix described below. Plasmids are digested with AscI (100 units) in NEBuffer 4 (20 mM Tris-acetate, 10 mM magnesium acetate, 50 mM potassium acetate, 1 mM dithiothreitol, pH 7.9), 100 μg/mL BSA, and 5 mM beta-mercaptoethanol at 37° C. for 1.5 h. The resulting DNA fragments are separated by gel electrophoresis on 1% SeaPlaque GTG agarose (BioWhitaker Molecular Applications) and the DNA fragments containing gene cassettes are cut from the agarose gel. DNA is purified from the agarose using the GELase digesting enzyme following the manufacturer's protocol.

[0303] A 50 μL aliquot of sterile distilled water containing 3 mg of gold particles (3 mg gold) is added to 30 μL of a 10 ng/μL DNA solution (either intact plasmid or DNA fragment prepared as described herein), 25 μL 5M CaCl₂ and 20 μL of 0.1 M spermidine. The mixture is shaken 3 min on level 3 of a vortex shaker and spun for 10 sec in a bench microfuge. The supernatant is removed, followed by a wash with 400 μL 100% ethanol and another brief centrifugation. The 400 μL ethanol is removed and the pellet is resuspended in 40 μL of 100% ethanol. Five μL of DNA suspension is dispensed to each flying disk of the Biolistic PDS1000/HE instrument disk. Each 5 μL aliquot contains approximately 0.375 mg gold per bombardment (e.g., per disk).

[0304] For model system transformations, the protocol is identical except for a few minor changes (i.e., 1 mg of gold particles is added to 5 μL of a 1 μg/μL DNA solution, 50 μL of a 2.5M CaCl₂ is used and the pellet is ultimately resuspended in 85 μL of 100% ethanol thus providing 0.058 mg of gold particles per bombardment).

Tissue Preparation and Bombardment with DNA:

[0305] Approximately 150-200 mg of seven day old embryogenic suspension cultures is placed in an empty, sterile 60×15 mm petri dish and the dish is covered with plastic mesh. The chamber is evacuated to a vacuum of 27-28 inches of mercury, and tissue is bombarded one or two shots per plate with membrane rupture pressure set at 1100 PSI. Tissue is placed approximately 3.5 inches from the retaining/stopping screen. Model system transformation conditions are identical except 100-150 mg of embryogenic tissue is used, rupture pressure is set at 650 PSI and tissue is place approximately 2.5 inches from the retaining screen.

### Selection of Transformed Embryos:

[0306] Transformed embryos are selected either using hygromycin (when the hygromycin B phosphotransferase (HPT) gene is used as the selectable marker) or chlorsulfuron (when the acetolactate synthase (ALS) gene is used as the selectable marker).

[0307] Following bombardment, the tissue is placed into fresh SB 196 media and cultured as described above. Six to eight days post-bombardment, the SB196 is exchanged with fresh SB196 containing either 30 mg/L hygromycin or 100 ng/mL chlorsulfuron, depending on the selectable marker used. The selection media is refreshed weekly. Four to six weeks post-selection, green, transformed tissue is observed growing from untransformed, necrotic embryogenic clusters.

### Embryo Maturation:

[0308] For production transformations, isolated, green tissue is removed and inoculated into multiwell plates to generate new, clonally propagated, transformed embryogenic suspension cultures. Transformed embryogenic clusters are cultured for four-six weeks in multiwell plates at 26° C. in SB 196 under cool white fluorescent (Phillips cool white Econowatt F40/CW/RS/EW) and Agro (Phillips F40 Agro) bulbs (40 watt) on a 16:8 hr photoperiod with light intensity of 90-120 μE/m²s. After this time embryo clusters are removed to a solid agar media, SB 166, for one-two weeks and then subcultured to SB103 medium for 3-4 weeks to mature embryos. After maturation on plates in SB 103, individual embryos are removed from the clusters, dried and screened for a desired phenotype.

[0309] For model system transformations, embryos are matured in soybean histodifferentiation and maturation liquid medium (SHaM liquid media; Schmidt et al., Cell Biology and Morphogenesis 24:393 (2005)) using a modified procedure. Briefly, after 4 weeks of selection in SB196 as described above, embryo clusters are removed to 35 mL of SB228 (SHaM liquid media) in a 250 mL Erlenmeyer flask. Tissue is maintained in SHaM liquid media on a rotary shaker at 130 rpm and 26° C. with cool white fluorescent lights on a 16:8 hr day/night photoperiod at a light intensity of 60-85 μE/m2/s for 2 weeks as embryos mature. Embryos grown for 2 weeks in SHaM liquid media are equivalent in size and fatty acid content to embryos cultured on SB166/SB103 for 5-8 weeks.

| 1. | Media Recipes: | | |
|---|---|---|---|
| 2. | SB 196 - FN Lite Liquid Proliferation Medium (per liter) | | |
| | MS FeEDTA - 100x Stock 1 | 10 | mL |
| | MS Sulfate - 100x Stock 2 | 10 | mL |
| | FN Lite Halides - 100x Stock 3 | 10 | mL |
| | FN Lite P, B, Mo - 100x Stock 4 | 10 | mL |
| | B5 vitamins (1 mL/L) | 1.0 | mL |
| | 2,4-D (10 mg/L final concentration) | 1.0 | mL |
| | KNO₃ | 2.83 | gm |
| | (NH₄)₂SO₄ | 0.463 | gm |
| | asparagine | 1.0 | gm |
| | sucrose (1%) | 10 | gm |
| | pH 5.8 | | |

FN Lite Stock Solutions

| | | | | | |
|---|---|---|---|---|---|
| | Stock Number | 1000 | mL | 500 | mL |
| 3. | 1 MS Fe EDTA 100x Stock | | | | |
| | Na₂ EDTA* | 3.724 | g | 1.862 | g |
| | FeSO₄—7H₂O | 2.784 | g | 1.392 | g |

*Add first, dissolve in dark bottle while stirring

| | | | | | |
|---|---|---|---|---|---|
| | 2 MS Sulfate 100x stock | | | | |
| | MgSO₄—7H₂O | 37.0 | g | 18.5 | g |
| | MnSO₄—H₂O | 1.69 | g | 0.845 | g |
| | ZnSO₄—7H₂O | 0.86 | g | 0.43 | g |
| | CuSO₄—5H₂O | 0.0025 | g | 0.00125 | g |
| 4. | 3 FN Lite Halides 100x Stock | | | | |
| | CaCl₂—2H₂O | 30.0 | g | 15.0 | g |
| 5. | KI | 0.083 | g | 0.0715 | g |
| | CoCl₂—6H₂O | 0.0025 | g | 0.00125 | g |
| 6. | 4 FN LiteP, B, Mo 100x Stock | | | | |
| | KH₂PO₄ | 18.5 | g | 9.25 | g |
| | H₃BO₃ | 0.62 | g | 0.31 | g |
| | Na₂MoO₄—2H₂O | 0.025 | g | 0.0125 | g |
| 7. | | | | | |

SB1 Solid Medium (per liter)

1 package MS salts (Gibco/BRL - Cat. No. 11117-066)
1 mL B5 vitamins 1000X stock
31.5 g Glucose
2 mL 2,4-D (20 mg/L final concentration)
pH 5.7
8 g TC agar

SB199 Solid Medium (per liter)

| | |
|---|---|
| | 1 package MS salts (Gibco/BRL - Cat. No. 11117-066) |
| | 1 mL B5 vitamins 1000X stock |
| | 30 g Sucrose |
| | 4 ml 2,4-D (40 mg/L final concentration) |
| | pH 7.0 |
| | 2 gm Gelrite |
| 8. | |

SB 166 Solid Medium (per liter)

1 package MS salts (Gibco/BRL - Cat. No. 11117-066)
1 mL B5 vitamins 1000X stock
60 g maltose
750 mg MgCl₂ hexahydrate
5 g activated charcoal
pH 5.7
2 g gelrite

SB 103 Solid Medium (per liter)

1 package MS salts (Gibco/BRL - Cat. No. 11117-066)
1 mL B5 vitamins 1000X stock
60 g maltose
750 mg MgCl2 hexahydrate
pH 5.7
2 g gelrite

SB 71-4 Solid Medium (per liter)

1 bottle Gamborg's B5 salts w/sucrose (Gibco/BRL - Cat. No. 21153-036)
pH 5.7
5 g TC agar

2,4-D Stock

Obtain premade from Phytotech Cat. No. D 295 - concentration 1 mg/mL

B5 Vitamins Stock (per 100 mL)

Store aliquots at −20° C.

10 g myo-inositol
100 mg nicotinic acid
100 mg pyridoxine HCl
1 g thiamine

[0310] If the solution does not dissolve quickly enough, apply a low level of heat via the hot stir plate.

SB 228- Soybean Histodifferentiation & Maturation (SHaM) (per liter)

| | | |
|---|---|---|
| DDI H₂O | 600 | mL |
| FN-Lite Macro Salts for SHaM 10X | 100 | mL |
| MS Micro Salts 1000x | 1 | mL |
| MS FeEDTA 100x | 10 | mL |
| CaCl 100x | 6.82 | mL |
| B5 Vitamins 1000x | 1 | mL |
| L-Methionine | 0.149 | g |
| Sucrose | 30 | g |
| Sorbitol | 30 | g |
| Adjust volume to 900 mL | | |
| pH 5.8 | | |
| Autoclave | | |
| Add to cooled media (≦30 C.): | | |
| *Glutamine (final concentration 30 mM) 4% | 110 | mL |

*Note: Final volume will be 1010 mL after glutamine addition.
Since glutamine degrades relatively rapidly, it may be preferable to add immediately prior to
using media. Expiration 2 weeks after glutamine is added; base media can be kept longer w/o
glutamine.
FN-lite Macro for SHAM 10X- Stock #1 (per liter)

| | | |
|---|---|---|
| (NH₄)2SO₄ (ammonium sulfate) | 4.63 | g |
| KNO₃ (potassium nitrate) | 28.3 | g |
| MgSO4*7H₂0 (magnesium sulfate heptahydrate) | 3.7 | g |
| KH₂PO₄ (potassium phosphate, monobasic) | 1.85 | g |
| Bring to volume | | |
| Autoclave | | |

MS Micro 1000X- Stock #2 (per 1 liter)

| | | |
|---|---|---|
| H₃BO₃ (boric acid) | 6.2 | g |
| MnSO₄*H₂O (manganese sulfate monohydrate) | 16.9 | g |
| ZnSO4*7H20 (zinc sulfate heptahydrate) | 8.6 | g |
| Na₂MoO₄*2H20 (sodium molybdate dihydrate) | 0.25 | g |
| CuSO₄*5H₂0 (copper sulfate pentahydrate) | 0.025 | g |
| CoCl₂*6H₂0 (cobalt chloride hexahydrate) | 0.025 | g |
| KI (potassium iodide) | 0.8300 | g |
| Bring to volume | | |
| Autoclave | | |

FeEDTA 100X- Stock #3 (per liter)

| | | |
|---|---|---|
| Na₂EDTA* (sodium EDTA) | 3.73 | g |
| FeSO₄*7H₂0 (iron sulfate heptahydrate) | 2.78 | g |

*EDTA must be completely dissolved before adding iron.

Bring to Volume

Solution is photosensitive. Bottle(s) should be wrapped in foil to omit light.

Autoclave

Ca 100X- Stock #4 (per liter)

| | | |
|---|---|---|
| CaCl₂*2H₂0 (calcium chloride dihydrate) | 44 | g |
| Bring to Volume | | |
| Autoclave | | |

B5 Vitamin 1000X- Stock #5 (per liter)

| | | |
|---|---|---|
| Thiamine*HCl | 10 | g |
| Nicotinic Acid | 1 | g |
| Pyridoxine*HCl | 1 | g |
| Myo-Inositol | 100 | g |
| Bring to Volume | | |
| Store frozen | | |

4% Glutamine- Stock #6 (per liter)

| | | |
|---|---|---|
| DDI water heated to 30° C. | 900 | ml |
| L-Glutamine | 40 | g |

Gradually add while stirring and applying low heat.

Do not exceed 35° C.
Bring to Volume
Filter Sterilize
Store frozen*
*Note: Warm thawed stock in 31° C. bath to fully dissolve crystals.

Regeneration of Soybean Somatic Embryos into Plants:

[0311] In order to obtain whole plants from embryogenic suspension cultures, the tissue must be regenerated. Embyros are matured as described in above. After subculturing on medium SB103 for 3 weeks, individual embryos can be removed from the clusters and screened for the desired phenotype as described in Example 1 or 2. It should be noted that any detectable phenotype, resulting from the expression of the genes of interest, could be screened at this stage.

[0312] Matured individual embryos are desiccated by placing them into an empty, small petri dish (35×10 mm) for approximately 4 to 7 days. The plates are sealed with fiber tape (creating a small humidity chamber). Desiccated embryos are planted into SB71-4 medium where they are left to germinate under the same culture conditions described above. Germinated plantlets are removed from germination medium and rinsed thoroughly with water and then are planted in Redi-Earth in 24-cell pack tray, covered with clear plastic dome. After 2 weeks the dome is removed and plants hardened off for a further week. If plantlets looked hardy they are transplanted to 10″ pot of Redi-Earth with up to 3 plantlets per pot. After 10 to 16 weeks, mature seeds are harvested, chipped and analyzed.

### Example 4

### Further Shuffling for Improved Ethametsulfuron Repressor Variants

### A. Fourth Round Shuffling

[0313] Fourth round shuffling was designed from phylogenetic alignments of TetR(B) homologues at 13 previously untested positions in addition to retesting selected substitutions at 23 previously shuffled positions. Also, the six cysteine residues aligning to wt TetR were varied with phylogenetically available diversity. This brought the total number of shuffled residues to 42. To screen this diversity two libraries, L10 and L11, were constructed (Table 5). As was done for L4 the diversity was titrated into the synthetic oligonucleotide mixture along with oligonucleotides representing parent clone L7-A11 to reduce the complexity of each individual clone (Table 6A-C).

TABLE 5
Diversity summary for libraries L10 thru L15.

| Residue | TetR(B) | | | | | |
|---|---|---|---|---|---|---|
| position | Residue | L10 | L11 | L12 | L13 | L15 |
| 55 | L | M | M | M | M | |
| 57 | I | IF | — | IF | — | |
| 60 | L | — | — | — | LF | |
| 61 | D | — | NED | — | — | |
| 62 | R | PR | — | PR | — | [symbol] |
| 64 | H | A | A | A | ADEKR | [symbol] |
| 65 | T | [symbol] | — | [symbol] | — | IT |
| 66 | H | — | HQY | — | — | |
| 67 | F | LFY | Y | [symbol] | Y | |
| 68 | C | LSC | LSC | LC | LC | |
| 69 | P | [symbol] | — | L | — | |
| 71 | E | — | VE | — | — | |
| 73 | E | [symbol] | — | AE | — | |
| 77 | D | — | DN | DNQ | — | DN |
| 82 | N | [symbol] | — | [symbol] | [symbol] | [symbol] |
| 86 | F | M | M | M | [symbol] | |
| 88 | C | RNC | RNC | N | N | |
| 99 | V | [symbol] | — | — | — | |
| 100 | H | C | C | C | [symbol] | [symbol] |
| 104 | R | G | GA | G | G | |
| 105 | P | FL | [symbol] | F | F | |
| 108 | K | Q | [symbol] | Q | Q | [symbol] |
| 109 | Q | QN | — | — | — | |
| 113 | L | AT | LVIA | A | AM | [symbol] |
| 114 | E | — | — | — | — | |
| 116 | Q | SR | MQS | SRQ | [symbol] | [symbol] |
| 121 | C | TC | [symbol] | T | T | |
| 129 | N | — | NHQ | NQ | — | |
| 134 | L | MW | M | M | [symbol] | FMNR |
| 135 | S | Q | RQ | Q | Q | |
| 136 | A | SAD | — | — | — | |
| 138 | G | — | [symbol] | — | — | |
| 139 | H | I | I | I | I | |
| 140 | F | Y | [symbol] | Y | Y | |
| 144 | C | [symbol] | [symbol] | — | — | |
| 145 | V | VA | — | — | — | |
| 147 | E | — | [symbol] | L | L | |
| 151 | H | L | [symbol] | L | L | |
| 162 | T | — | QT | — | — | |
| 166 | M | MK | — | — | — | |
| 170 | L | VI | V | V | V | |
| 174 | I | L | LVW | L | [symbol] | [symbol] |
| 175 | E | EN | — | — | — | |
| 177 | F | K | [symbol] | K | [symbol] | [symbol] |
| 183 | E | — | EDG | — | — | |
| 184 | P | PL | — | — | — | |
| 185 | A | — | AD | — | — | |
| 195 | C | SRAC | SRAC | S | S | |
| 203 | C | SRAC | [symbol] | A | A | |

(—) = same as TetR
Italic = biased incorporation by design
BOLD and Oversized = Bias from screening
Residues in parentheses = unintended mutations

TABLE 6A
Oligonucleotides for assembly and rescue of
Libraries L10 and L11.

| Oligo | SEQ | | |
|---|---|---|---|
| Name | ID No | Sequence | Pool # |
| L10:1 | 890 | TGGCACGTCAAGAACAAGCGAGCTCTGCTAGACGCTATGGCC | 10a |
| L10:2 | 891 | ATCGAGATGCTCGATCSCCACGCTATACACTWCTTACYCTTG | 10b |
| L10:3 | 892 | TTCGAGATGCTCGATCSCCACGCTATACACTWCTTACYCTTG | |
| L10:4 | 893 | ATCGAGATGCTCGATCSCCACGCTATACACTWCWGTCYCTTG | |
| L10:5 | 894 | TTCGAGATGCTCGATCSCCACGCTATACACTWCWGTCYCTTG | |
| L10:6 | 895 | ATCGAGATGCTCGATCSCCACGCTATACACTTGTTACYCTTG | |
| L10:7 | 896 | TTCGAGATGCTCGATCSCCACGCTATACACTTGTTACYCTTG | |
| L10:8 | 897 | ATCGAGATGCTCGATCSCCACGCTATACACTTGWGTCYCTTG | |
| L10:9 | 898 | TTCGAGATGCTCGATCSCCACGCTATACACTTGWGTCYCTTG | |
| L10:10 | 899 | ATCGAGATGCTCGATCSCCACGCTMCCCACTWCTTACYCTTG | |
| L10:11 | 900 | TTCGAGATGCTCGATCSCCACGCTMCCCACTWCTTACYCTTG | |
| L10:12 | 901 | ATCGAGATGCTCGATCSCCACGCTMCCCACTWCWGTCYCTTG | |
| L10:13 | 902 | TTCGAGATGCTCGATCSCCACGCTMCCCACTWCWGTCYCTTG | |
| L10:14 | 903 | ATCGAGATGCTCGATCSCCACGCTMCCCACTTGTTACYCTTG | |
| L10:15 | 904 | TTCGAGATGCTCGATCSCCACGCTMCCCACTTGTTACYCTTG | |
| L10:16 | 905 | ATCGAGATGCTCGATCSCCACGCTMCCCACTTGWGTCYCTTG | |
| L10:17 | 906 | TTCGAGATGCTCGATCSCCACGCTMCCCACTTGWGTCYCTTG | |
| L10:18 | 907 | GAAGGGGMAAGCTGGCAAGACTTCTTGAGGAACAAMGCTAAG | 10c |
| L10:19 | 908 | TCCATGAGAAACGCTTTGCTCAGTCACCGTGATGGAGCCAAG | 10d |
| L10:20 | 909 | TCCATGAGAYGTGCTTTGCTCAGTCACCGTGATGGAGCCAAG | |
| L10:21 | 910 | GCGTGTCTAGGTACGGGCTTMACGGAGCAAAACTATGAAACT | 10e |
| L10:22 | 911 | GTGTGTCTAGGTACGGGCTTMACGGAGCAAAACTATGAAACT | |
| L10:23 | 912 | GCGTGTCTAGGTACGGGCTTMACGGAGCAACAATATGAAACT | |
| L10:24 | 913 | GTGTGTCTAGGTACGGGCTTMACGGAGCAACAATATGAAACT | |
| L10:25 | 914 | ACGGAGAACMGCCTTGCCTTCCTGTGTCAACAAGGTTTCTCC | 10f |
| L10:26 | 915 | GCGGAGAACMGCCTTGCCTTCCTGTGTCAACAAGGTTTCTCC | |
| L10:27 | 916 | ACGGAGAACMGCCTTGCCTTCCTGACGCAACAAGGTTTCTCC | |
| L10:28 | 917 | GCGGAGAACMGCCTTGCCTTCCTGACGCAACAAGGTTTCTCC | |
| L10:29 | 918 | CTTGAGAACGCCCTCTACGCATGGCAAGACSTGGGGATCTAC | 10g |
| L10:30 | 919 | CTTGAGAACGCCCTCTACGCATGGCAAKCASTGGGGATCTAC | |
| L10:31 | 920 | CTTGAGAACGCCCTCTACGCAATGCAAGACSTGGGGATCTAC | |
| L10:32 | 921 | CTTGAGAACGCCCTCTACGCAATGCAAKCASTGGGGATCTAC | |
| L10:33 | 922 | ACTCTGGGTTGSGYGTTGCTGGATCAAGAGCTGCAAGTCGCT | 10h |
| L10:34 | 923 | ACTCTGGGTKCGGYGTTGCTGGATCAAGAGCTGCAAGTCGCT | |
| L10:35 | 924 | AAGGAGGAGAGGGAAACACCTACTACTGATAGTAWGCCGCCA | 10i |
| L10:36 | 925 | CTGRTACGACAAGCTCTGAACCTCAAGGATCACCAAGGTGCA | 10j |
| L10:37 | 926 | CTGRTACGACAAGCTCTGGAACTCAAGGATCACCAAGGTGCA | |
| L10:38 | 927 | GAGCYCGCCTTCCTGTTCGGCCTTGAACTGATCATAGCTGGA | 10k |
| L10:39 | 928 | GAGCYCGCCTTCCTGTTCGGCCTTGAACTGATCATAHGCGGA | |
| L10:40 | 929 | TTGGAGAAGCAGCTGAAGGCTGAAAGTGGGTCTTAATGATAG | 10L |
| L10:41 | 930 | TTGGAGAAGCAGCTGAAGHGTGAAAGTGGGTCTTAATGATAG | |
| L10:42 | 031 | GTGGSGATCGAGCATCTCGAWGGCCATAGCGTCTAGCAGAGC | 10m |
| L10:43 | 932 | GTCTTGCCAGCTTKCCCCTTCCAAGRGTAAGWAGTGTATAGC | 10n |
| L10:44 | 933 | GTCTTGCCAGCTTKCCCCTTCCAAGRGACWGWAGTGTATAGC | |
| L10:45 | 934 | GTCTTGCCAGCTTKCCCCTTCCAAGRGTAACAAGTGTATAGC | |
| L10:46 | 935 | GTCTTGCCAGCTTKCCCCTTCCAAGRGACWCAAGTGTATAGC | |
| L10:47 | 935 | GTCTTGCCAGCTTKCCCCTTCCAAGRGTAAGWAGTGGGKAGC | |
| L10:48 | 937 | GTCTTGCCAGCTTKCCCCTTCCAAGRGACWGWAGTGGGKAGC | |
| L10:49 | 938 | GTCTTGCCAGCTTKCCCCTTCCAAGRGTAACAAGTGGGKAGC | |
| L10:50 | 939 | GTCTTGCCAGCTTKCCCCTTCCAAGRGACWCAAGTGGGKAGC | |
| L10:51 | 940 | GAGCAAAGCGTTTCTCATGGACTTAGCKTTGTTCCTCAAGAA | 10o |
| L10:52 | 041 | GAGCAAAGCACRTCTCATGGACTTAGCKTTGTTCCTCAAGAA | |
| L10:53 | 942 | GAAGCCCGTACCTAGACACRCCTTGGCTCCATCACGGTGACT | 10p |
| L10:54 | 943 | TAAGCCCGTACCTAGACACRCCTTGGCTCCATCACGGTGACT | |
| L10:55 | 944 | GAAGGCAAGGCKGTTCTCCGYAGTTTCATAGTTTTGCTCCGT | 10q |
| L10:56 | 945 | GAAGGCAAGGCKGTTCTCCGYAGTTTCATATTGTTGCTCCGT | |
| L10:57 | 946 | TGCGTAGAGGGCGTTCTCAAGGGAGAAACCTTGTTGACACAG | 10r |
| L10:58 | 947 | TGCGTAGAGGGCGTTCTCAAGGGAGAAACCTTGTTGCGTCAG | |
| L10:59 | 948 | CAGCAACRCSCAACCCAGAGTGTAGATCCCCASGTCTTGCCA | 10s |
| L10:60 | 949 | CAGCAACRCCGMACCCAGAGTGTAGATCCCCASGTCTTGCCA | |
| L10:61 | 950 | CAGCAACRCSCAACCCAGAGTGTAGATCCCCASTGMTTGCCA | |
| L10:62 | 051 | CAGCAACRCCGMACCCAGAGTGTAGATCCCCASTGMTTGCCA | |
| L10:63 | 952 | CAGCAACRCSCAACCCAGAGTGTAGATCCCCASGTCTTGCAT | |
| L10:64 | 953 | CAGCAACRCCGMACCCAGAGTGTAGATCCCCASGTCTTGCAT | |
| L10:65 | 954 | CAGCAACRCSCAACCCAGAGTGTAGATCCCCASTGMTTGCAT | |
| L10:66 | 955 | CAGCAACRCCGMACCCAGAGTGTAGATCCCCASTGMTTGCAT | |
| L10:67 | 956 | AGGTGTTTCCCTCTCCTCCTTAGCGACTTGCAGCTCTTGATC | 10t |
| L10:68 | 957 | GTTCAGAGCTTGTCGTAYCAGTGGCGGCWTACTATCAGTAGT | 10u |
| L10:69 | 958 | TTCCAGAGCTTGTCGTAYCAGTGGCGGCWTACTATCAGTAGT | |
| L10:70 | 959 | GCCGAACAGGAAGGCGRGCTCTGCACCTTGGTGATCCTTGAG | 10v |
| L10:71 | 960 | AGCCTTCAGCTGCTTCTCCAATCCAGCTATGATCAGTTCAAG | 10w |
| L10:72 | 061 | ACGCTTCAGCTGCTTCTCCAATCCAGCTATGATCAGTTCAAG | |
| L10:73 | 962 | ACTCTTCAGCTGCTTCTCCAATCCAGCTATGATCAGTTCAAG | |
| L10:74 | 963 | ACACTTCAGCTGCTTCTCCAATCCAGCTATGATCAGTTCAAG | |
| L10:75 | 964 | AGCCTTCAGCTGCTTCTCCAATCCGCDTATGATCAGTTCAAG | |
| L10:76 | 965 | ACGCTTCAGCTGCTTCTCCAATCCGCDTATGATCAGTTCAAG | |
| L10:77 | 966 | ACTCTTCAGCTGCTTCTCCAATCCGCDTATGATCAGTTCAAG | |
| L10:78 | 967 | ACACTTCAGCTGCTTCTCCAATCCGCDTATGATCAGTTCAAG | |
| L10:79 | 968 | GCGCCAAGGTACCTTCTGCAGCTATCATTAAGACCCACTTTC | 10x |

TABLE 6B

| Oligo | SEQ ID | | |
|---|---|---|---|
| Name | NO | Sequence | Pool # |
| L11:1 | 969 | TGGCACGTCAAGAACAAGCGAGCTCTGCTAGACGCTATGGCC | 11a |
| L11:2 | 970 | ATTGAGATGCTCAACAGGCACGCTACCCASTACCTACCTTTG | 11b |
| L11:3 | 971 | ATTGAGATGCTCAACAGGCACGCTACCCASTACTSTCCTTTG | |
| L11:4 | 972 | ATTGAGATGCTCAACAGGCACGCTACCTATTACCTACCTTTG | |
| L11:5 | 973 | ATTGAGATGCTCAACAGGCACGCTACCTATTACTSTCCTTTG | |
| L11:6 | 974 | ATTGAGATGCTCGAKAGGCACGCTACCCASTACCTACCTTTG | |
| L11:7 | 975 | ATTGAGATGCTCGAKAGGCACGCTACCCASTACTSTCCTTTG | |
| L11:8 | 976 | ATTGAGATGCTCGAKAGGCACGCTACCTATTACCTACCTTTG | |
| L11:9 | 977 | ATTGAGATGCTCGAKAGGCACGCTACCTATTACTSTCCTTTG | |
| L11:10 | 978 | GWGGGGGAAAGCTGGCAARATTTCTTGAGGAACAACGCTAAG | 11c |
| L11:11 | 979 | TCCATGAGAAATGCTTTGCTCAGTCACCGTGATGGAGCCAAG | 11d |
| L11:12 | 980 | TCCATGAGAYGTGCTTTGCTCAGTCACCGTGATGGAGCCAAG | |
| L11:13 | 981 | GTCTGTCTAGGTACGGSGDTCACGGAGAACCAGTATGAAACT | 11e |
| L11:14 | 982 | GTCTGTCTAGGTACGGSGDTCACGGAGCAACAGTATGAAACT | |
| L11:15 | 983 | GTCTGTCTAGGTACGGSGTGGACGGAGAACCAGTATGAAACT | |
| L11:16 | 984 | GTCTGTCTAGGTACGGSGTGGACGGAGCAACAGTATGAAACT | |
| L11:17 | 985 | CTTGAGAACTCACTTGCCTTCCTGTGCCAACAAGGTTTCTCC | 11f |
| L11:18 | 986 | GTTGAGAACTCACTTGCCTTCCTGTGCCAACAAGGTTTCTCC | |
| L11:19 | 987 | ATTGAGAACTCACTTGCCTTCCTGTGCCAACAAGGTTTCTCC | |
| L11:20 | 988 | CTTGAGAACTCACTTGCCTTCCTGACGCAACAAGGTTTCTCC | |
| L11:21 | 989 | GTTGAGAACTCACTTGCCTTCCTGACGCAACAAGGTTTCTCC | |
| L11:22 | 990 | ATTGAGAACTCACTTGCCTTCCTGACGCAACAAGGTTTCTCC | |
| L11:23 | 991 | CTTGAGAACCAGCTTGCCTTCCTGTGCCAACAAGGTTTCTCC | |
| L11:24 | 992 | GTTGAGAACCAGCTTGCCTTCCTGTGCCAACAAGGTTTCTCC | |
| L11:25 | 993 | ATTGAGAACCAGCTTGCCTTCCTGTGCCAACAAGGTTTCTCC | |
| L11:26 | 994 | CTTGAGAACCAGCTTGCCTTCCTGACGCAACAAGGTTTCTCC | |
| L11:27 | 995 | GTTGAGAACCAGCTTGCCTTCCTGACGCAACAAGGTTTCTCC | |
| L11:28 | 996 | ATTGAGAACCAGCTTGCCTTCCTGACGCAACAAGGTTTCTCC | |
| L11:29 | 997 | CTTGAGAACATGCTTGCCTTCCTGTGCCAACAAGGTTTCTCC | |
| L11:30 | 998 | GTTGAGAACATGCTTGCCTTCCTGTGCCAACAAGGTTTCTCC | |
| L11:31 | 999 | ATTGAGAACATGCTTGCCTTCCTGTGCCAACAAGGTTTCTCC | |
| L11:32 | 1000 | CTTGAGAACATGCTTGCCTTCCTGACGCAACAAGGTTTCTCC | |
| L11:33 | 1001 | GTTGAGAACATGCTTGCCTTCCTGACGCAACAAGGTTTCTCC | |
| L11:34 | 1002 | ATTGAGAACATGCTTGCCTTCCTGACGCAACAAGGTTTCTCC | |
| L11:35 | 1003 | GCCGAGAACTCACTTGCCTTCCTGTGCCAACAAGGTTTCTCC | |
| L11:36 | 1004 | GCCGAGAACTCACTTGCCTTCCTGACGCAACAAGGTTTCTCC | |
| L11:37 | 1005 | GCCGAGAACCAGCTTGCCTTCCTGTGCCAACAAGGTTTCTCC | |
| L11:38 | 1006 | GCCGAGAACCAGCTTGCCTTCCTGACGCAACAAGGTTTCTCC | |
| L11:39 | 1007 | GCCGAGAACATGCTTGCCTTCCTGTGCCAACAAGGTTTCTCC | |
| L11:40 | 1008 | GCCGAGAACATGCTTGCCTTCCTGACGCAACAAGGTTTCTCC | |
| L11:41 | 1009 | CTTGAGAATGCCCTCTACGCAATGCRGGCTGTTCGGATCTWC | 11g |
| L11:42 | 1010 | CTTGAGAATGCCCTCTACGCAATGCRGGCTGTTGSCATCTWC | |
| L11:43 | 1011 | CTTGAGCAWGCCCTCTACGCAATGCRGGCTGTTCGGATCTWC | |
| L11:44 | 1012 | CTTGAGCAWGCCCTCTACGCAATGCRGGCTGTTGSCATCTWC | |
| L11:45 | 1013 | ACTCTGGGTTSCGTCTTGTGGGATCAAGAGCTACAAGTCGCT | 11h |
| L11:46 | 1014 | ACTCTGGGTTSCGTCTTGTGGGATCAAGAGADGCAAGTCGCT | |
| L11:47 | 1015 | ACTCTGGGTTSCGTCTTGSTAGATCAAGAGCTACAAGTCGCT | |
| L11:48 | 1016 | ACTCTGGGTTSCGTCTTGSTAGATCAAGAGADGCAAGTCGCT | |
| L11:49 | 1017 | AAGGAGGAGAGGGAAACACCTACTACTGATAGTATGCCGCCA | 11i |
| L11:50 | 1018 | AAGGAGGAGAGGGAAACACCTCAGACTGATAGTATGCCGCCA | |
| L11:51 | 1019 | CTGGTTCGACAAGCTKTGGAACTCCDGGATCACCAAGGTGCA | 11j |
| L11:52 | 1020 | CTGGTTCGACAAGCTKTGGAACTCAAAGATCACCAAGGTGCA | |
| L11:53 | 1021 | CTGGTTCGACAAGCTTGGGAACTCCDGGATCACCAAGGTGCA | |
| L11:54 | 1022 | CTGGTTCGACAAGCTTGGGAACTCAAAGATCACCAAGGTGCA | |
| L11:55 | 1023 | GRWCCAGMTTTCCTGTTCGGCCTTGAACTGATCATAGCAGGA | 11k |
| L11:56 | 1024 | GRWCCAGMTTTCCTGTTCGGCCTTGAACTGATCATAHGCGGA | |
| L11:57 | 1025 | TTGGAGAAGCAGCTGAAGHGCGAAAGTGGGTCTTAATGATAG | 11L |
| L11:58 | 1026 | TTGGAGAAGCAGCTGAAGGCGGAAAGTGGGTCTTAATGATAG | |
| L11:59 | 1027 | GTGCCTGTTGAGCATCTCAATGGCCATAGCGTCTAGCAGAGC | 11m |
| L11:60 | 1028 | GTGCCTMTCGAGCATCTCAATGGCCATAGCGTCTAGCAGAGC | |
| L11:61 | 1029 | ATYTTGCCAGCTTTCCCCCWCCAAAGGTAGGTASTGGGTAGC | 11n |
| L11:62 | 1030 | ATYTTGCCAGCTTTCCCCCWCCAAAGGASAGTASTGGGTAGC | |
| L11:63 | 1031 | ATYTTGCCAGCTTTCCCCCWCCAAAGGTAGGTAATAGGTAGC | |
| L11:64 | 1032 | ATYTTGCCAGCTTTCCCCCWCCAAAGGASAGTAATAGGTAGC | |
| L11:65 | 1033 | GAGCAAAGCATTTCTCATGGACTTAGCGTTGTTCCTCAAGAA | 11o |
| L11:66 | 1034 | GAGCAAAGCACRTCTCATGGACTTAGCGTTGTTCCTCAAGAA | |
| L11:67 | 1035 | GAHCSCCGTACCTAGACAGACCTTGGCTCCATCACGGTGACT | 11p |
| L11:68 | 1036 | CCACSCCGTACCTAGACAGACCTTGGCTCCATCACGGTGACT | |
| L11:69 | 1037 | GAAGGCAAGTGAGTTCTCAABAGTTTCATACTGGTTCTCCGT | 11q |
| L11:70 | 1038 | GAAGGCAAGCTGGTTCTCAABAGTTTCATACTGGTTCTCCGT | |
| L11:71 | 1039 | GAAGGCAAGCATGTTCTCAABAGTTTCATACTGGTTCTCCGT | |
| L11:72 | 1040 | GAAGGCAAGTGAGTTCTCGGCAGTTTCATACTGGTTCTCCGT | |
| L11:73 | 1041 | GAAGGCAAGCTGGTTCTCGGCAGTTTCATACTGGTTCTCCGT | |
| L11:74 | 1042 | GAAGGCAAGCATGTTCTCGGCAGTTTCATACTGGTTCTCCGT | |
| L11:75 | 1043 | GAAGGCAAGTGAGTTCTCAABAGTTTCATACTGTTGCTCCGT | |
| L11:76 | 1044 | GAAGGCAAGCTGGTTCTCAABAGTTTCATACTGTTGCTCCGT | |
| L11:77 | 1045 | GAAGGCAAGCATGTTCTCAABAGTTTCATACTGTTGCTCCGT | |
| L11:78 | 1046 | GAAGGCAAGTGAGTTCTCGGCAGTTTCATACTGTTGCTCCGT | |
| L11:79 | 1047 | GAAGGCAAGCTGGTTCTCGGCAGTTTCATACTGTTGCTCCGT | |
| L11:80 | 1048 | GAAGGCAAGCATGTTCTCGGCAGTTTCATACTGTTGCTCCGT | |
| L11:81 | 1049 | TGCGTAGAGGGCATTCTCAAGGGAGAAACCTTGTTGGCACAG | 11r |
| L11:82 | 1050 | TGCGTAGAGGGCWTGCTCAAGGGAGAAACCTTGTTGGCACAG | |
| L11:83 | 1051 | TGCGTAGAGGGCATTCTCAAGGGAGAAACCTTGTTGCGTCAG | |
| L11:84 | 1052 | TGCGTAGAGGGCWTGCTCAAGGGAGAAACCTTGTTGCGTCAG | |
| L11:85 | 1053 | CCACAAGACGSAACCCAGAGTGWAGATCCGAACAGCCYGCAT | 11s |
| L11:86 | 1054 | TASCAAGACGSAACCCAGAGTGWAGATCCGAACAGCCYGCAT | |
| L11:87 | 1055 | CCACAAGACGSAACCCAGAGTGWAGATGSCAACAGCCYGCAT | |
| L11:88 | 1056 | TASCAAGACGSAACCCAGAGTGWAGATGSCAACAGCCYGCAT | |
| L11:89 | 1057 | AGGTGTTTCCCTCTCCTCCTTAGCGACTTGTAGCTCTTGATC | 11t |
| L11:90 | 1058 | AGGTGTTTCCCTCTCCTCCTTAGCGACTTGCHTCTCTTGATC | |
| L11:91 | 1059 | TTCCAMAGCTTGTCGAACCAGTGGCGGCATACTATCAGTAGT | 11u |
| L11:92 | 1060 | TTCCCAAGCTTGTCGAACCAGTGGCGGCATACTATCAGTAGT | |
| L11:93 | 1061 | TTCCAMAGCTTGTCGAACCAGTGGCGGCATACTATCAGTCTG | |
| L11:94 | 1062 | TTCCCAAGCTTGTCGAACCAGTGGCGGCATACTATCAGTCTG | |
| L11:95 | 1063 | GCCGAACAGGAAAKCTGGWYCTGCACCTTGGTGATCCHGGAG | 11v |
| L11:96 | 1064 | GCCGAACAGGAAAKCTGGWYCTGCACCTTGGTGATCTTTGAG | |
| L11:97 | 1065 | GCDCTTCAGCTGCTTCTCCAATCCTGCTATGATCAGTTCAAG | 11w |
| L11:98 | 1066 | CGCCTTCAGCTGCTTCTCCAATCCTGCTATGATCAGTTCAAG | |
| L11:99 | 1067 | GCDCTTCAGCTGCTTCTCCAATCCGCDTATGATCAGTTCAAG | |
| L11:100 | 1068 | CGCCTTCAGCTGCTTCTCCAATCCGCDTATGATCAGTTCAAG | |
| L11:101 | 1069 | GCGCCAAGGTACCTTCTGCAGCTATCATTAAGACCCACTTTC | 11x |

TABLE 6C

| Oligo | SEQ ID | | |
|---|---|---|---|
| Name | NO | Sequence | Pool |
| EsRA11:1 | 1070 | TGGCACGTCAAGAACAAGCGAGCTCTGCTAGACGCTATGGCC | A11a |
| EsRA11:2 | 1071 | ATTGAGATGCTCGATAGGCACGCTACCCACTACTSTCCTTTG | A11b |
| EsRA11:3 | 1072 | ATTGAGATGCTCGATAGGCACGCTACCCACTACCTACCTTTG | |
| EsRA11:4 | 1073 | GAAGGGGAAAGCTGGCAAGACTTCTTGAGGAACAACGCTAAG | A11c |
| EsRA11:5 | 1074 | TCCATGAGAYGCGCTTTGCTCAGTCACCGTGATGGAGCCAAG | A11d |
| EsRA11:6 | 1075 | TCCATGAGAAATGCTTTGCTCAGTCACCGTGATGGAGCCAAG | |
| EsRA11:7 | 1076 | GTCTGTCTAGGTACGGGCTTCACGGAGCAACAGTATGAAACT | A11e |
| EsRA11:8 | 1077 | GCTGAGAACAGCCTTGCCTTCCTGACACAACAAGGTTTCTCC | A11f |
| EsRA11:9 | 1078 | GCTGAGAACAGCCTTGCCTTCCTGTGTCAACAAGGTTTCTCC | |
| EsRA11:10 | 1079 | CTTGAGAACGCCCTCTACGCAATGCAAGCTGTTGGGATCTAC | A11g |
| EsRA11:11 | 1080 | ACTCTGGGTWGTGTCTTGCTGGATCAAGAGCTGCAAGTCGCT | A11h |
| EsRA11:12 | 1081 | AAGGAGGAGAGGGAAACACCTACTACTGATAGTATGCCGCCA | A11i |
| EsRA11:13 | 1082 | CTGGTTCGACAAGCTCTGGAACTCAAGGATCACCAAGGTGCA | A11j |
| EsRA11:14 | 1083 | GAGCCAGCCTTCCTGTTCGGCCTTGAACTGATCATAGCAGGA | A11k |
| EsRA11:15 | 1084 | GAGCCAGCCTTCCTGTTCGGCCTTGAACTGATCATAHGCGGA | |
| EsRA11:16 | 1085 | TTGGAGAAGCAGCTGAAGGCCGAAAGTGGGTCTTAATGATAG | A11L |
| EsRA11:17 | 1086 | TTGGAGAAGCAGCTGAAGHGTGAAAGTGGGTCTTAATGATAG | |
| EsRA11:18 | 1087 | GTGCCTATCGAGCATCTCAATGGCCATAGCGTCTAGCAGAGC | A11m |
| EsRA11:19 | 1088 | GTCTTGCCAGCTTTCCCCTTCCAAAGGASAGTAGTGGGTAGC | A11n |
| EsRA11:20 | 1089 | GTCTTGCCAGCTTTCCCCTTCCAAAGGTAGGTAGTGGGTAGC | |
| EsRA11:21 | 1090 | GAGCAAAGCGCRTCTCATGGACTTAGCGTTGTTCCTCAAGAA | A11o |
| EsRA11:22 | 1091 | GAGCAAAGCATTTCTCATGGACTTAGCGTTGTTCCTCAAGAA | |
| EsRA11:23 | 1092 | GAAGCCCGTACCTAGACAGACCTTGGCTCCATCACGGTGACT | A11p |
| EsRA11:24 | 1093 | GAAGGCAAGGCTGTTCTCAGCAGTTTCATACTGTTGCTCCGT | A11q |
| EsRA11:25 | 1094 | TGCGTAGAGGGCGTTCTCAAGGGAGAAACCTTGTTGTGTCAG | A11r |
| EsRA11:26 | 1095 | TGCGTAGAGGGCGTTCTCAAGGGAGAAACCTTGTTGACACAG | |
| EsRA11:27 | 1096 | CAGCAAGACACWACCCAGAGTGTAGATCCCAACAGCTTGCAT | A11s |
| EsRA11:28 | 1097 | AGGTGTTTCCCTCTCCTCCTTAGCGACTTGCAGCTCTTGATC | A11t |
| EsRA11:29 | 1098 | TTCCAGAGCTTGTCGAACCAGTGGCGGCATACTATCAGTAGT | A11u |
| EsRA11:30 | 1099 | GCCGAACAGGAAGGCTGGCTCTGCACCTTGGTGATCCTTGAG | A11v |
| EsRA11:31 | 1100 | GGCCTTCAGCTGCTTCTCCAATCCTGCTATGATCAGTTCAAG | A11w |
| EsRA11:32 | 1101 | ACDCTTCAGCTGCTTCTCCAATCCTGCTATGATCAGTTCAAG | |
| EsRA11:33 | 1102 | GGCCTTCAGCTGCTTCTCCAATCCGCDTATGATCAGTTCAAG | |
| EsRA11:34 | 1103 | ACDCTTCAGCTGCTTCTCCAATCCGCDTATGATCAGTTCAAG | |
| EsRA11:35 | 1104 | GCGCCAAGGTACCTTCTGCAGCTATCATTAAGACCCACTTTC | A11x |
| SynSU5′ | 1105 | CACGTCAAGAACAAGCGAGCTCTGCTAGAC | |
| SynSU3′ | 1106 | GGAACTTCGGCGCGCCAAGGTACCTTCTGCAGCTATC | |

[0314] Following library assembly and cloning approximately 100-L10 and 130-L11 putative hits were identified from ˜20,000 repressor positive clones. The clones were re-arrayed and ranked for repressor and ligand activity by relative colony color on M9 X-gal indicator (U.S. Utility application Ser. No. 13/086,765, filed on Apr. 14, 2011 and in US Application Publication 2010-0105141, both of which are herein incorporated by reference in their entirety) plates containing 0, 1.5 and 7 ppb ethametsulfuron. All putative hits and 180 random clones from each library were sequenced and the data sets compared to create sequence activity relationships (Table 5). Library 10 results show P69L, E73A, and N82K substitutions are biased in improved clones while C144 was strongly selected over the diversity as 31 vs. 11; 31 vs. 10; 28 vs. 4; and 85 vs. 42% of the hits contained these residues compared to the randomly selected population, respectively. Although I57F was poorly incorporated in the library (none in the random population), it was found in 5% of the hit population—mostly associated with the top ligand responsive clones. Incorporation data for L11 shows that residues G104, F105, Q108, A113, Q135, G138, Y140, C144, L147, L151, and K177 were all nearly 100% conserved. The results for positions 104, 105, 135, 147, and 151 corroborate the results for the in vitro mutagenesis study showing these residues to be highly important for activity. Additionally, residues 68C and S116 were also selectively maintained over optional diversity while C121T and C203A were both preferred as 71 vs. 45 and 56 vs. 35% of the respective hits vs. random clones contained these latter changes. Top hits from libraries L10 and L11 are shown in Table 7.

### B. Fifth Round Shuffling:

[0315] One of the key and often overlooked aspects of any gene switch is maintenance of a very low level of expression in the ‘off’ state. To enhance the stringency of the in vivo repressor assay a new library vector, pVER7571, was constructed with a mutated ribosome binding site to lower the basal level of repressor produced in our assay strain and thus enhance the sensitivity of ‘leakiness’ detection. Library L12 was constructed in this new vector. Library L12 focused on reiterative shuffling of positive residue diversity from libraries L10 & L11 and (Table 5). Library L12 was constructed from thirty-two oligonucleotides (Table 8).

TABLE 8
Oligonucleotides for assembly of library L12.

| Oligo | Sequence | SEQ ID NO |
|---|---|---|
| L12:1 | TGGCACGTCAAGAACAAGCGAGCTCTGCTAGACGCTATGGCC | 1107 |
| L12:2 | ATCGAGATGCTCGATCSCCACGCTATACACTWTTTACYATTG | 1108 |
| L12:3 | TTCGAGATGCTCGATCSCCACGCTATACACTWTTTACYATTG | 1109 |
| L12:4 | ATCGAGATGCTCGATCSCCACGCTMCCCACTWTTTACYATTG | 1110 |
| L12:5 | TTCGAGATGCTCGATCSCCACGCTMCCCACTWTTTACYATTG | 1111 |
| L12:6 | GAAGGGGMAAGCTGGCAAAATTTCTTGAGGAACAAMGCTAAG | 1112 |
| L12:7 | TCCATGAGAAACGCTTTGCTCAGTCACCGTGATGGAGCCAAG | 1113 |
| L12:8 | GTCTGTCTAGGTACGGGCTTCACGGAGCAACAATATGAAACT | 1114 |
| L12:9 | GCGGAGAACCGCCTTGCCTTCCTGACACAACAAGGTTTCTCC | 1115 |
| L12:10 | CTTGAGAACGCCCTCTACGCATGGCAAGCAGTGGGGATCTAC | 1116 |
| L12:11 | CTTGAGCAGGCCCTCTACGCATGGCAAGCAGTGGGGATCTAC | 1117 |
| L12:12 | ACTCTGGGTTGTGTCTTGCTGGATCAAGAGCTGCAAGTCGCT | 1118 |
| L12:13 | AAGGAGGAGAGGGAAACACCTACTACTGATAGTATGCCGCCA | 1119 |
| L12:14 | CTGGTTCGACAAGCTKTAGAACTCAAGGATCACCAAGGTGCA | 1120 |
| L12:15 | CTGGTTCGACAAGCTTGGGAACTCAAGGATCACCAAGGTGCA | 1121 |
| L12:16 | GAGCCAGCCTTCCTGTTCGGCCTTGAACTGATCATATCAGGA | 1122 |
| L12:17 | TTGGAGAAGCAGCTGAAGGCAGAAAGTGGGTCTTAATGATAG | 1123 |
| L12:18 | GTGGSGATCGAGCATCTCGAWGGCCATAGCGTCTAGCAGAGC | 1124 |
| L12:19 | ATTTTGCCAGCTTKCCCCTTCCAATRGTAAAWAGTGTATAGC | 1125 |
| L12:20 | ATTTTGCCAGCTTKCCCCTTCCAATRGTAAAWAGTGGGKAGC | 1126 |
| L12:21 | GAGCAAAGCGTTTCTCATGGACTTAGCKTTGTTCCTCAAGAA | 1127 |
| L12:22 | GAAGCCCGTACCTAGACAGACCTTGGCTCCATCACGGTGACT | 1128 |
| L12:23 | GAAGGCAAGGCGGTTCTCCGCAGTTTCATATTGTTGCTCCGT | 1129 |
| L12:24 | TGCGTAGAGGGCGTTCTCAAGGGAGAAACCTTGTTGTGTCAG | 1130 |
| L12:25 | TGCGTAGAGGGCCTGCTCAAGGGAGAAACCTTGTTGTGTCAG | 1131 |
| L12:26 | CAGCAAGACACAACCCAGAGTGTAGATCCCCACTGCTTGCCA | 1132 |
| L12:27 | AGGTGTTTCCCTCTCCTCCTTAGCGACTTGCAGCTCTTGATC | 1133 |
| L12:28 | TTCTAMAGCTTGTCGAACCAGTGGCGGCATACTATCAGTAGT | 1134 |
| L12:29 | TTCCCAAGCTTGTCGAACCAGTGGCGGCATACTATCAGTAGT | 1135 |
| L12:30 | GCCGAACAGGAAGGCTGGCTCTGCACCTTGGTGATCCTTGAG | 1136 |
| L12:31 | TGCCTTCAGCTGCTTCTCCAATCCTGATATGATCAGTTCAAG | 1137 |
| L12:32 | GCGCCAAGGTACCTTCTGCAGCTATCATTAAGACCCACTTTC | 1138 |

[0316] Approximately 10,000 clones from library L12 were screened using the genetic plate assay with no inducer to detect leaky B-gal expression and then addition of 2 ppb ethametsulfuron plus and minus 0.002% arabinose. The latter treatment increases the stringency of induction since arabinose induces repressor production. Sixty-six putative hits were ranked for activity and their sequences determined Sequences were also determined from a population of 94 random clones and the two data sets compared. The data showed that wt TetR residues I57, R62, P69, E73, and N82 and substitutions T65I and F67Y were preferred. With the exception of E73 and N82 the preferences were modest. An alignment of the top hits from L12 is shown in Table 7.

### C. Sixth Round Shuffling:

[0317] A sixth round of shuffling using vector pVER7571 incorporated the best diversity from Rd5 shuffling (Table 5). The fully synthetic library was constructed from oligonucleotides shown in Table 9. 7,500 clones were screened by the M9 X-gal plate based assay for repression in the absence of any inducers and induction in the presence of 2 ppb Es+/−0.002% arabinose. Forty-six putative hits were re-arrayed and replica plated onto the same series of M9 X-gal assay plates. The hits were ranked for induction and repression and their sequences determined in addition to 92 randomly selected clones. Sequence analysis of the hit population show that N82, W116, and to a lesser extent Y174 were strongly selected against relative to the alternative diversity (2 vs 25; 0 vs. 41; and 9 vs. 45%, respectively). Also, within the top performing group of hits W82, F134, A177, and to a lesser degree Q108 were selected for improved activity relative to the alternative diversity at these positions. Sequences of L15 hits are shown in Table 7.

TABLE 9
Oligonucleotides for assembly of library L15.

| Oligo Name | Sequence | SEQ ID NO |
|---|---|---|
| L15:1 | TGGCACGTCAAGAACAAGCGAGCTCTGCTAGACGCTATGGCC | 1139 |
| L15:2 | ATAGAGATGCTCGATCSGCACCAAAYTCACTACTTACCCTTG | 1140 |
| L15:3 | ATAGAGATGCTCGATCSGCACAVGAYTCACTACTTACCCTTG | 1141 |
| L15:4 | GAAGGGGAAAGCTGGCAARATTTCTTGAGGAACWGGGCTAAG | 1142 |
| L15:5 | GAAGGGGAAAGCTGGCAARATTTCTTGAGGAACAAKGCTAAG | 1143 |
| L15:6 | TCCATGAGAAATGCTTTGCTCAGTCACCGTGATGGAGCCAAG | 1144 |
| L15:7 | GTCGCACTAGGTACGGGCTTCACGGAGMRACAATATGAAACT | 1145 |
| L15:8 | GTCTGTCTAGGTACGGGCTTCACGGAGMRACAATATGAAACT | 1146 |
| L15:9 | ATGGAGAACTSGCTTGCCTTCCTGACACAACAAGGTTTCTCC | 1147 |
| L15:10 | ATGGAGAACAASCTTGCCTTCCTGACACAACAAGGTTTCTCC | 1148 |
| L15:11 | CAAGAGAACTSGCTTGCCTTCCTGACACAACAAGGTTTCTCC | 1149 |
| L15:12 | CAAGAGAACAASCTTGCCTTCCTGACACAACAAGGTTTCTCC | 1150 |
| L15:13 | GCTGAGAACTSGCTTGCCTTCCTGACACAACAAGGTTTCTCC | 1151 |
| L15:14 | TCTGAGAACTSGCTTGCCTTCCTGACACAACAAGGTTTCTCC | 1152 |
| L15:15 | GCTGAGAACAASCTTGCCTTCCTGACACAACAAGGTTTCTCC | 1153 |
| L15:16 | TCTGAGAACAASCTTGCCTTCCTGACACAACAAGGTTTCTCC | 1154 |
| L15:17 | CTTGAGAACGCCCTCTACGCATTCCAAGCAGTGGGGATCTAC | 1155 |
| L15:18 | CTTGAGAACGCCCTCTACGCAAKGCAAGCAGTGGGGATCTAC | 1156 |
| L15:19 | CTTGAGAACGCCCTCTACGCAAATCAAGCAGTGGGGATCTAC | 1157 |
| L15:20 | ACTCTGGGTTGTGTCTTGCTGGATCAAGAGCTGCAAGTCGCT | 1158 |
| L15:21 | AAGGAGGAGAGGGAAACACCTACTACTGATAGTATGCCGCCA | 1159 |
| L15:22 | CTGGTTCGACAAGCTTACGAACTCGCGGATCACCAAGGTGCA | 1160 |
| L15:23 | CTGGTTCGACAAGCTTACGAACTCTYCGATCACCAAGGTGCA | 1161 |
| L15:24 | CTGGTTCGACAAGCTTACGAACTCAATGATCACCAAGGTGCA | 1162 |
| L15:25 | CTGGTTCGACAAGCTDTTGAACTCGCGGATCACCAAGGTGCA | 1163 |
| L15:26 | CTGGTTCGACAAGCTDTTGAACTCTYCGATCACCAAGGTGCA | 1164 |
| L15:27 | CTGGTTCGACAAGCTDTTGAACTCAATGATCACCAAGGTGCA | 1165 |
| L15:28 | GAGCCAGCCTTCCTGTTCGGCCTTGAACTGATCATATCAGGA | 1166 |
| L15:29 | TTGGAGAAGCAGCTGAAGGCCGAAAGTGGGTCTTAATGATAG | 1167 |
| L15:30 | GTGCSGATCGAGCATCTCTATGGCCATAGCGTCTAGCAGAGC | 1168 |
| L15:31 | ATYTTGCCAGCTTTCCCCTTCCAAGGGTAAGTAGTGARTTTG | 1169 |
| L15:32 | ATYTTGCCAGCTTTCCCCTTCCAAGGGTAAGTAGTGARTCBT | 1170 |
| L15:33 | GAGCAAAGCATTTCTCATGGACTTAGCCCWGTTCCTCAAGAA | 1171 |
| L15:34 | GAGCAAAGCATTTCTCATGGACTTAGCMTTGTTCCTCAAGAA | 1172 |
| L15:35 | GAAGCCCGTACCTAGTGCGACCTTGGCTCCATCACGGTGACT | 1173 |
| L15:36 | GAAGCCCGTACCTAGACAGACCTTGGCTCCATCACGGTGACT | 1174 |
| L15:37 | GAAGGCAAGCSAGTTCTCCATAGTTTCATATTGTYKCTCCGT | 1175 |
| L15:38 | GAAGGCAAGSTTGTTCTCCATAGTTTCATATTGTYKCTCCGT | 1176 |
| L15:39 | GAAGGCAAGCSAGTTCTCTTGAGTTTCATATTGTYKCTCCGT | 1177 |
| L15:40 | GAAGGCAAGSTTGTTCTCTTGAGTTTCATATTGTYKCTCCGT | 1178 |
| L15:41 | GAAGGCAAGCSAGTTCTCAGMAGTTTCATATTGTYKCTCCGT | 1179 |
| L15:42 | GAAGGCAAGSTTGTTCTCAGMAGTTTCATATTGTYKCTCCGT | 1180 |
| L15:43 | TGCGTAGAGGGCGTTCTCAAGGGAGAAACCTTGTTGTGTCAG | 1181 |
| L15:44 | CAGCAAGACACAACCCAGAGTGTAGATCCCCACTGCTTGGAA | 1182 |
| L15:45 | CAGCAAGACACAACCCAGAGTGTAGATCCCCACTGCTTGCMT | 1183 |
| L15:46 | CAGCAAGACACAACCCAGAGTGTAGATCCCCACTGCTTGATT | 1184 |
| L15:47 | AGGTGTTTCCCTCTCCTCCTTAGCGACTTGCAGCTCTTGATC | 1185 |
| L15:48 | TTCGTAAGCTTGTCGAACCAGTGGCGGCATACTATCAGTAGT | 1186 |
| L15:49 | TTCAAHAGCTTGTCGAACCAGTGGCGGCATACTATCAGTAGT | 1187 |
| L15:50 | GCCGAACAGGAAGGCTGGCTCTGCACCTTGGTGATCCGCGAG | 1188 |
| L15:51 | GCCGAACAGGAAGGCTGGCTCTGCACCTTGGTGATCGRAGAG | 1189 |
| L15:52 | GCCGAACAGGAAGGCTGGCTCTGCACCTTGGTGATCATTGAG | 1190 |
| L15:53 | GGCCTTCAGCTGCTTCTCCAATCCTGATATGATCAGTTCAAG | 1191 |
| L15:54 | GCGCCAAGGTACCTTCTGCAGCTATCATTAAGACCCACTTTC | 1192 |

TABLE 7
Sequence summary of top hits from Libraries L10, L11, L12, L13, and L15.

| | Sequence Position/Residue Substitution | | | | | | | | | | | | | | | | | | | | |
|---|---|---|---|---|---|---|---|---|---|---|---|---|---|---|---|---|---|---|---|---|---|
| Clone | 55 | 57 | 60 | 61 | 62 | 64 | 65 | 67 | 68 | 69 | 72 | 73 | 75 | 77 | 82 | 85 | 86 | 88 | 92 | 99 | 100 |
| TetR (B) | L | I | L | D | R | H | T | F | C | P | G | E | W | D | N | S | F | C | S | V | H |
| L10-A04 | M | — | — | — | — | A | — | Y | — | — | — | — | — | — | K | — | M | N | — | — | C |
| L10-A05 | M | — | — | — | — | A | — | Y | — | — | — | — | — | — | K | — | M | — | — | — | C |
| L10-A06 | M | — | — | — | — | A | — | Y | L | — | — | A | — | — | K | — | M | N | — | — | C |
| L10-A09 | M | — | — | — | P | A | I | L | L | — | — | A | — | — | — | — | M | R | — | — | C |
| L10-A11 | M | — | — | — | — | A | — | Y | L | — | — | — | — | — | K | — | M | — | — | — | C |
| L10-B02 | M | — | — | — | P | A | — | — | — | L | — | — | — | — | — | — | M | N | — | — | C |
| L10-B03 | M | — | — | — | — | A | — | Y | S | — | — | — | — | — | K | — | M | — | — | — | C |
| L10-B06 | M | — | — | — | P | A | P | L | L | — | — | A | — | — | — | — | M | — | — | — | C |
| L10-B07 | M | — | — | — | — | A | I | L | L | — | — | — | — | — | — | — | M | — | — | — | C |
| L10-B08 | M | — | — | — | — | A | — | Y | L | — | — | A | — | — | K | — | M | R | — | — | C |
| L11-C02 | M | — | — | — | P | A | — | Y | S | — | — | — | — | — | K | — | M | — | — | — | C |
| L11-C06 | M | — | — | — | — | A | — | Y | S | — | R | — | — | N | — | — | M | N | — | — | C |
| L12-1-10 | M | F | — | — | — | A | I | — | L | — | — | A | — | N | T | — | M | N | — | — | C |
| L12-1-11 | M | F | — | — | P | A | I | Y | L | — | — | — | — | N | H | — | M | N | — | — | C |
| L12-1-21 | M | F | — | — | — | A | P | Y | L | — | — | A | — | N | — | — | M | N | — | — | C |
| L12-2-13 | M | — | — | — | — | A | I | Y | L | — | — | A | — | N | — | — | M | N | — | — | C |
| L12-2-23 | M | F | — | — | — | A | — | Y | L | — | — | — | — | N | — | — | M | N | — | — | C |
| L12-2-27 | M | F | — | — | — | A | I | Y | L | — | — | A | — | N | — | — | M | N | — | L | C |
| L12-2-48 | M | — | — | — | — | A | I | Y | L | — | — | — | — | N | — | — | M | N | — | — | C |
| L13-1-9 | M | — | — | — | — | A | — | Y | — | — | — | — | — | — | K | — | M | N | — | — | A |
| L13-1-10 | M | — | F | — | — | D | — | Y | — | — | — | — | C | — | K | — | M | N | — | — | A |
| L13-1-16 | M | — | F | — | — | K | — | Y | — | — | — | — | — | — | R | — | M | N | — | — | A |
| L13-1-42 | M | — | — | — | — | K | — | Y | — | — | — | — | — | — | K | — | M | N | — | — | A |
| L13-1-43 | M | — | — | — | — | A | — | Y | — | — | — | — | — | — | R | — | M | N | — | — | A |
| L13-2-18 | M | — | F | — | — | A | — | Y | — | — | — | — | — | — | K | — | M | N | R | — | A |
| L13-2-23 | M | — | F | — | — | A | — | Y | — | — | — | — | — | — | K | — | M | N | — | — | A |
| L13-2-24 | M | — | — | — | — | K | — | Y | L | — | — | — | — | — | — | — | M | N | — | — | C |
| L15-1 | M | — | — | — | — | Q | V | N | L | — | — | — | — | — | W | — | M | N | — | — | C |
| L15-14 | M | — | — | — | — | R | I | Y | L | — | — | — | — | — | K | — | M | N | — | — | C |
| L15-20 | M | — | — | — | P | K | I | Y | L | — | — | — | — | — | R | — | M | N | — | — | C |
| L15-35 | M | — | — | — | — | T | — | Y | L | — | — | — | — | N | W | — | M | N | — | — | C |
| L15-36 | M | — | — | G | — | K | — | Y | L | — | — | — | — | — | W | — | M | N | — | — | C |
| L15-41 | M | — | — | — | — | K | — | Y | L | — | — | — | — | — | K | — | M | I | — | — | C |

| | Sequence Position/Residue Substitution | | | | | | | | | | | | | |
|---|---|---|---|---|---|---|---|---|---|---|---|---|---|---|
| Clone | 101 | 104 | 105 | 108 | 113 | 116 | 118 | 121 | 129 | 134 | 135 | 139 | 140 | 144 |
| TetR (B) | L | R | P | K | L | Q | A | C | N | L | S | H | F | C |
| L10-A04 | — | G | F | Q | A | S | — | — | — | M | Q | I | Y | — |
| L10-A05 | — | G | F | Q | A | S | — | — | — | M | Q | I | Y | — |
| L10-A06 | — | G | F | Q | A | S | — | — | — | M | Q | I | Y | — |
| L10-A09 | — | G | F | Q | A | S | — | — | — | M | Q | I | Y | — |
| L10-A11 | — | G | F | Q | A | S | — | T | — | M | Q | I | Y | — |
| L10-B02 | — | G | F | Q | A | S | — | — | — | M | Q | I | Y | — |
| L10-B03 | — | G | F | Q | A | S | — | T | — | M | Q | I | Y | — |
| L10-B06 | — | G | F | Q | A | S | — | T | — | M | Q | I | Y | — |
| L10-B07 | — | G | F | Q | A | R | — | T | — | W | Q | I | Y | — |
| L10-B08 | — | G | F | Q | A | S | — | T | — | M | Q | I | Y | — |
| L11-C02 | — | G | F | Q | A | S | — | — | — | M | Q | I | Y | S |
| L11-C06 | — | G | F | Q | A | S | — | T | — | M | Q | I | Y | — |
| L12-1-10 | — | G | F | R | A | R | — | T | Q | W | Q | I | Y | — |
| L12-1-11 | — | G | F | Q | A | R | — | T | — | W | Q | I | Y | — |
| L12-1-21 | — | G | F | Q | A | H | — | T | — | W | Q | I | Y | — |
| L12-2-13 | — | G | F | Q | A | S | — | T | Q | W | Q | I | Y | — |
| L12-2-23 | — | G | F | R | A | R | — | T | — | W | Q | I | Y | — |
| L12-2-27 | — | G | F | Q | A | R | — | T | Q | W | Q | I | Y | — |
| L12-2-48 | — | G | F | Q | A | R | — | T | — | W | Q | I | Y | — |
| L13-1-9 | — | G | F | Q | M | S | — | T | — | F | Q | I | Y | — |
| L13-1-10 | — | G | F | Q | A | S | — | T | — | F | Q | I | Y | — |
| L13-1-16 | — | G | F | Q | M | S | — | T | — | M | Q | I | Y | — |
| L13-1-42 | — | G | F | Q | M | S | — | T | — | M | Q | I | Y | — |
| L13-1-43 | — | G | F | Q | M | S | — | T | — | F | Q | I | Y | — |
| L13-2-18 | — | G | F | Q | A | C | — | T | — | F | Q | I | Y | — |
| L13-2-23 | — | G | F | Q | A | C | — | T | — | F | Q | I | Y | — |
| L13-2-24 | — | G | F | Q | A | W | — | T | — | F | Q | I | Y | — |
| L15-1 | — | G | F | R | S | K | — | T | — | F | Q | I | Y | — |
| L15-14 | — | G | F | Q | Q | S | — | T | — | N | Q | I | Y | — |
| L15-20 | — | G | F | R | A | T | — | T | — | F | Q | I | Y | — |
| L15-35 | — | G | F | Q | M | S | — | T | — | M | Q | I | Y | — |
| L15-36 | — | G | F | Q | M | N | D | T | — | M | Q | I | Y | R |
| L15-41 | — | G | F | — | A | T | — | T | — | F | Q | I | Y | — |

| | Sequence Position/Residue Substitution | | | | | | | | | | | |
|---|---|---|---|---|---|---|---|---|---|---|---|---|
| Clone | 145 | 147 | 148 | 150 | 151 | 153 | 170 | 174 | 177 | 184 | 195 | 203 |
| TetR (B) | V | E | D | E | H | V | L | I | F | P | C | C |
| L10-A04 | — | L | — | — | L | — | V | L | K | — | A | A |
| L10-A05 | — | L | — | — | L | — | V | L | K | — | S | A |
| L10-A06 | — | L | — | — | L | — | V | L | K | — | A | S |
| L10-A09 | — | L | — | — | L | — | V | L | K | — | — | A |
| L10-A11 | — | L | — | — | L | — | V | L | K | L | R | — |
| L10-B02 | — | L | — | — | L | — | V | L | K | — | S | — |
| L10-B03 | — | L | — | — | L | — | V | L | K | — | A | A |
| L10-B06 | A | L | — | — | L | — | V | L | K | — | S | R |
| L10-B07 | — | L | — | — | L | — | V | L | K | — | G | S |
| L10-B08 | — | L | N | — | L | — | V | L | K | — | A | A |
| L11-C02 | A | L | — | — | L | — | V | L | K | — | R | — |
| L11-C06 | — | L | — | — | L | — | V | V | K | — | A | — |
| L12-1-10 | — | L | — | — | L | — | V | W | K | — | S | A |
| L12-1-11 | — | L | — | — | L | — | V | W | K | — | S | A |
| L12-1-21 | — | L | — | Q | L | — | V | W | K | — | S | A |
| L12-2-13 | — | L | — | — | L | F | V | V | K | — | S | A |
| L12-2-23 | — | L | — | — | L | — | V | W | K | — | S | A |
| L12-2-27 | — | L | — | — | L | — | V | W | K | — | S | A |
| L12-2-48 | — | L | — | — | L | — | V | L | K | — | S | A |
| L13-1-9 | — | L | — | — | L | — | V | Y | K | — | — | A |
| L13-1-10 | — | L | — | — | L | — | V | — | H | — | S | — |
| L13-1-16 | — | L | — | — | L | — | V | Y | K | — | — | A |
| L13-1-42 | — | L | — | — | L | — | V | Y | K | — | S | — |
| L13-1-43 | — | L | — | — | L | — | V | Y | K | — | — | — |
| L13-2-18 | — | L | — | — | L | — | V | — | K | — | — | — |
| L13-2-23 | — | L | — | — | L | — | V | Y | K | — | — | — |
| L13-2-24 | — | L | — | — | L | — | V | L | H | — | S | A |
| L15-1 | — | L | — | — | L | — | V | — | A | — | S | A |
| L15-14 | — | L | — | — | L | — | V | — | A | — | S | A |
| L15-20 | — | L | — | — | L | — | V | Y | A | — | S | A |
| L15-35 | — | L | — | — | L | — | V | V | A | — | S | A |
| L15-36 | — | L | — | — | L | — | V | F | — | — | S | A |
| L15-41 | — | L | — | — | L | — | V | F | A | — | S | A |

[0318] Various nucleotide sequences of the top hits from Libraries L10, L11, L12, L13, and L15 are set forth in SEQ ID NOS: 1193-1380. Various amino acid sequences of top hits from Libraries L10, L11, L12, L13, and L15 are set forth in SEQ ID NOS: 1381-1568.

### Example 5

### Chlorsulfuron Repressor Shuffling

### A. Second-Round Shuffling

[0319] The original library was designed to thifensulfuron, but once induction activity was established with other SU compounds having potentially better soil and in planta stability properties than the original ligand, the evolution process was re-directed towards these alternative ligands. Of particular interest were herbicides metsulfuron, sulfometuron, ethametsulfuron and chlorsulfuron. For this objective, parental clones L1-9, -22, -29 and -44 were chosen for further shuffling. Clone L1-9 has strong activity on both ethametsulfuron and chlorsulfuron; clone L1-22 has strong sulfometuron activity; clone L1-29 has moderate metsulfuron activity; and clone L1-44 has moderate activity on metsulfuron, ethametsulfuron and chlorsulfuron. (Data not shown.). No clones found in the initial screen were exceptionally reactive to metsulfuron. These four clones were also chosen due to their relatively strong repressor activity, showing low β-gal background activity without inducer. Strong repressor activity is important for establishing a system which is both highly sensitive to the presence of inducer, and tightly off in the absence of inducer.

[0320] Based on the sequence information from parental clones L1-9, -22, -29 and -44, two second round libraries were designed, constructed and screened. The first library, L2, consisted of a ‘family’ shuffle whereby the amino acid diversity between the selected parental clones was varied using synthetic assembly of oligonucleotides to find clones improved in responsiveness to any of the four new target ligands. A summary of the diversity used and the resulting hit sequences for library L2 is shown in Table 10.

TABLE 10

| | Amino acid residue position | | | | | | | | | | |
|---|---|---|---|---|---|---|---|---|---|---|---|
| Clone | 60 | 64 | 82 | 86 | 100 | 104 | 105 | 113 | 116 | 134 | 135 |
| wt | L | H | N | F | H | R | P | L | Q | L | S |
| Parents | | | | | | | | | | | |
| L1-9 | — | A | — | M | C | G | F | A | S | M | Q |
| L1-22 | M | — | T | Y | C | A | I | K | N | R | Q |
| L1-29 | M | Q | T | M | W | — | W | P | M | W | — |
| L1-44 | — | A | — | Y | Y | A | V | A | — | V | K |
| Hits | | | | | | | | | | | |
| L2-2 | — | Q | — | M | C | — | F | K | — | V | — |
| L2-9 | M | Q | — | M | Y | — | W | A | — | W | — |
| L2-10 | — | A | — | M | W | G | W | K | M | M | — |
| L2-13 | — | Q | — | M | C | — | W | A | — | W | Q |
| L2-14 | M | A | — | M | C | — | W | A | M | V | — |
| L2-18 | M | Q | T | M | W | — | W | A | — | M | — |
| L1-45 | A | Q | — | W | W | G | L | P | V | T | Q |
| Unselected | random | random | random | random | W > C, Y | R >> G, A | W > V > | random | random | random | S >> Q, K |
| frequency | | | | | | | I, F | | | | |

| | Amino acid residue position | | | | | | | | Inducer |
|---|---|---|---|---|---|---|---|---|---|
| Clone | 138 | 139 | 147 | 151 | 164 | 174 | 177 | 203 | preference |
| wt | G | H | E | H | D | I | F | C | atc |
| Parents | | | | | | | | | |
| L1-9 | C | I | L | L | — | L | K | — | 4, 9 (weak) |
| L1-22 | R | V | F | M | — | S | L | S | 3 |
| L1-29 | C | N | S | R | — | W | S | — | 9 (weak) |
| L1-44 | A | G | W | S | A | V | A | — | 9 (weak) |
| Hits | | | | | | | | | |
| L2-2 | R | I | W | M | — | W | L | — | 4 (inverse) |
| L2-9 | A | I | W | S | — | S | K | — | 9 (leaky) |
| L2-10 | R | I | L | L | — | W | K | — | 4 (leaky) |
| L2-13 | R | I | S | M | — | V | K | — | 9 |
| L2-14 | R | V | F | S | A | L | K | — | 9 |
| L2-18 | R | N | F | L | A | W | K | — | 9 |
| L1-45 | R | — | G | R | — | A | L | — | 3, 4 |
| Unselected | A >> C, R | G, N > V > I | random | random | random | random | random | C >> S | |
| frequency | | | | | | | | | |

[0321] The oligonucleotides used to construct the library are shown in Table 11. The L2 oligonucleotides were assembled, cloned and screened as per the protocol described for library L1 except that each ligand was tested at 2 ppm to increase the stringency of the assay, which is a 10-fold reduction from 1st round library screening concentration.

TABLE 11

| | | SEQ |
|---|---|---|
| Oligo | Sequence | ID |
| L2:01 | TATTGGCATGTAAAAAATAAGCGAGCTCTGCTCGACGCC | 1569 |
| | TTA | |
| L2:02 | GCCATTGAGATGWTGGATAGGCACCASACTCACTTTTGC | 1570 |
| | CCT | |
| L2:03 | GCCATTGAGATGWTGGATAGGCACGCAACTCACTTTTGC | 1571 |
| | CCT | |
| L2:04 | TTAGAAGGGGAAAGCTGGCAAGATTTTTTACGTAATAMT | 1572 |
| | GCT | |
| L2:05 | AAAAGTTACAGATGTGCTTTACTAAGTCATCGCGATGGA | 1573 |
| | GCA | |
| L2:06 | AAAAGTATGAGATGTGCTTTACTAAGTCATCGCGATGGA | 1574 |
| | GCA | |
| L2:07 | AAAGTATRTTTAGGTACACGCDTCACAGAAAAACAGTAT | 1575 |
| | GAA | |
| L2:08 | AAAGTATRTTTAGGTACACGCTGGACAGAAAAACAGTAT | 1576 |
| | GAA | |
| L2:09 | AAAGTATRTTTAGGTACAGSTDTCACAGAAAAACAGTAT | 1577 |
| | GAA | |
| L2:10 | AAAGTATRTTTAGGTACAGSTTGGACAGAAAAACAGTAT | 1578 |
| | GAA | |
| L2:11 | AAAGTATGGTTAGGTACACGCDTCACAGAAAAACAGTAT | 1579 |
| | GAA | |
| L2:12 | AAAGTATGGTTAGGTACACGCTGGACAGAAAAACAGTAT | 1580 |
| | GAA | |
| L2:13 | AAAGTATGGTTAGGTACAGSTDTCACAGAAAAACAGTAT | 1581 |
| | GAA | |
| L2:14 | AAAGTATGGTTAGGTACAGSTTGGACAGAAAAACAGTAT | 1582 |
| | GAA | |
| L2:15 | ACTAAAGAAAATARCTTAGCCTTTTTATGCCAACAAGGT | 1583 |
| | TTT | |
| L2:16 | ACTAAAGAAAATCAATTAGCCTTTTTATGCCAACAAGGT | 1584 |
| | TTT | |
| L2:17 | ACTAAAGAAAATATGTTAGCCTTTTTATGCCAACAAGGT | 1585 |
| | TTT | |
| L2:18 | ACTSCTGAAAATARCTTAGCCTTTTTATGCCAACAAGGT | 1586 |
| | TTT | |
| L2:19 | ACTSCTGAAAATCAATTAGCCTTTTTATGCCAACAAGGT | 1587 |
| | TTT | |
| L2:20 | ACTSCTGAAAATATGTTAGCCTTTTTATGCCAACAAGGT | 1588 |
| | TTT | |
| L2:21 | TCACTAGAGAATGCATTATATGCARTGAGTGCTGTGGCT | 1589 |
| | AWT | |
| L2:22 | TCACTAGAGAATGCATTATATGCARTGAGTGCTGTGGCT | 1590 |
| | GKT | |
| L2:23 | TCACTAGAGAATGCATTATATGCARTGAGTGCTGTGYGC | 1591 |
| | AWT | |
| L2:24 | TCACTAGAGAATGCATTATATGCARTGAGTGCTGTGYGC | 1592 |
| | GKT | |
| L2:25 | TCACTAGAGAATGCATTATATGCARTGMAAGCTGTGGCT | 1593 |
| | AWT | |
| L2:26 | TCACTAGAGAATGCATTATATGCARTGMAAGCTGTGGCT | 1594 |
| | GKT | |
| L2:27 | TCACTAGAGAATGCATTATATGCARTGMAAGCTGTGYGC | 1595 |
| | AWT | |
| L2:28 | TCACTAGAGAATGCATTATATGCARTGMAAGCTGTGYGC | 1596 |
| | GKT | |
| L2:29 | TCACTAGAGAATGCATTATATGCAWGGAGTGCTGTGGCT | 1597 |
| | AWT | |
| L2:30 | TCACTAGAGAATGCATTATATGCAWGGAGTGCTGTGGCT | 1598 |
| | GKT | |
| L2:31 | TCACTAGAGAATGCATTATATGCAWGGAGTGCTGTGYGC | 1599 |
| | AWT | |
| L2:32 | TCACTAGAGAATGCATTATATGCAWGGAGTGCTGTGYGC | 1600 |
| | GKT | |
| L2:33 | TCACTAGAGAATGCATTATATGCAWGGMAAGCTGTGGCT | 1601 |
| | AWT | |
| L2:34 | TCACTAGAGAATGCATTATATGCAWGGMAAGCTGTGGCT | 1602 |
| | GKT | |
| L2:35 | TCACTAGAGAATGCATTATATGCAWGGMAAGCTGTGYGC | 1603 |
| | AWT | |
| L2:36 | TCACTAGAGAATGCATTATATGCAWGGMAAGCTGTGYGC | 1604 |
| | GKT | |
| L2:37 | TTTACTTTAGGTTGCGTATTGTKGGATCAAGAGAGMCAA | 1605 |
| | GTC | |
| L2:38 | TTTACTTTAGGTTGCGTATTGTKGGATCAAGAGMTGCAA | 1606 |
| | GTC | |
| L2:39 | TTTACTTTAGGTTGCGTATTGTYTGATCAAGAGAGMCAA | 1607 |
| | GTC | |
| L2:40 | TTTACTTTAGGTTGCGTATTGTYTGATCAAGAGMTGCAA | 1608 |
| | GTC | |
| L2:41 | GCTAAAGAAGAAAGGGAAACACCTACTACTGMTAGTATG | 1609 |
| | CCG | |
| L2:42 | CCATTATTACGACAAGCTAGTGAATTATTGGATCACCAA | 1610 |
| | GGT | |
| L2:43 | CCATTATTACGACAAGCTAGTGAATTAKCAGATCACCAA | 1611 |
| | GGT | |
| L2:44 | CCATTATTACGACAAGCTAGTGAATTAAAGGATCACCAA | 1612 |
| | GGT | |
| L2:45 | CCATTATTACGACAAGCTTKGGAATTATTGGATCACCAA | 1613 |
| | GGT | |
| L2:46 | CCATTATTACGACAAGCTTKGGAATTAKCAGATCACCAA | 1614 |
| | GGT | |
| L2:47 | CCATTATTACGACAAGCTTKGGAATTAAAGGATCACCAA | 1615 |
| | GGT | |
| L2:48 | CCATTATTACGACAAGCTGTAGAATTATTGGATCACCAA | 1616 |
| | GGT | |
| L2:49 | CCATTATTACGACAAGCTGTAGAATTAKCAGATCACCAA | 1617 |
| | GGT | |
| L2:50 | CCATTATTACGACAAGCTGTAGAATTAAAGGATCACCAA | 1618 |
| | GGT | |
| L2:51 | GCAGAGCCAGCCTTCTTATTCGGCCTTGAATTGATCATA | 1619 |
| | TGC | |
| L2:52 | GGATTAGAAAAACAACTTAAATSCGAAAGTGGGTCTTAA | 1620 |
| L2:53 | CCTATCCAWCATCTCAATGGCTAAGGCGTCGAGCAGAGC | 1621 |
| | TCG | |
| L2:54 | TTGCCAGCTTTCCCCTTCTAAAGGGCAAAAGTGAGTSTG | 1622 |
| | GTG | |
| L2:55 | TTGCCAGCTTTCCCCTTCTAAAGGGCAAAAGTGAGTTGC | 1623 |
| | GTG | |
| L2:56 | TAAAGCACATCTGTAACTTTTAGCAKTATTACGTAAAAA | 1624 |
| | ATC | |
| L2:57 | TAAAGCACATCTCATACTTTTAGCAKTATTACGTAAAAA | 1625 |
| | ATC | |
| L2:58 | GCGTGTACCTAAAYATACTTTTGCTCCATCGCGATGACT | 1626 |
| | TAG | |
| L2:59 | ASCTGTACCTAAAYATACTTTTGCTCCATCGCGATGACT | 1627 |
| | TAG | |
| L2:60 | GCGTGTACCTAACCATACTTTTGCTCCATCGCGATGACT | 1628 |
| | TAG | |
| L2:61 | ASCTGTACCTAACCATACTTTTGCTCCATCGCGATGACT | 1629 |
| | TAG | |
| L2:62 | GGCTAAGYTATTTTCTTTAGTTTCATACTGTTTTTCTGT | 1630 |
| | GAH | |
| L2:63 | GGCTAATTGATTTTCTTTAGTTTCATACTGTTTTTCTGT | 1631 |
| | GAH | |
| L2:64 | GGCTAACATATTTTCTTTAGTTTCATACTGTTTTTCTGT | 1632 |
| | GAH | |
| L2:65 | GGCTAAGYTATTTTCAGSAGTTTCATACTGTTTTTCTGT | 1633 |
| | GAH | |
| L2:66 | GGCTAATTGATTTTCAGSAGTTTCATACTGTTTTTCTGT | 1634 |
| | GAH | |
| L2:67 | GGCTAACATATTTTCAGSAGTTTCATACTGTTTTTCTGT | 1635 |
| | GAH | |
| L2:68 | GGCTAAGYTATTTTCTTTAGTTTCATACTGTTTTTCTGT | 1636 |
| | CCA | |
| L2:69 | GGCTAATTGATTTTCTTTAGTTTCATACTGTTTTTCTGT | 1637 |
| | CCA | |
| L2:70 | GGCTAACATATTTTCTTTAGTTTCATACTGTTTTTCTGT | 1638 |
| | CCA | |
| L2:71 | GGCTAAGYTATTTTCAGSAGTTTCATACTGTTTTTCTGT | 1639 |
| | CCA | |
| L2:72 | GGCTAATTGATTTTCAGSAGTTTCATACTGTTTTTCTGT | 1640 |
| | CCA | |
| L2:73 | GGCTAACATATTTTCAGSAGTTTCATACTGTTTTTCTGT | 1641 |
| | CCA | |
| L2:74 | ATATAATGCATTCTCTAGTGAAAAACCTTGTTGGCATAA | 1642 |
| | AAA | |
| L2:75 | CAATACGCAACCTAAAGTAAAAWTAGCCACAGCACTCAY | 1643 |
| | TGC | |
| L2:76 | CAATACGCAACCTAAAGTAAAAMCAGCCACAGCACTCAY | 1644 |
| | TGC | |
| L2:77 | CAATACGCAACCTAAAGTAAAAWTGCRCACAGCACTCAY | 1645 |
| | TGC | |
| L2:78 | CAATACGCAACCTAAAGTAAAAMCGCRCACAGCACTCAY | 1646 |
| | TGC | |
| L2:79 | CAATACGCAACCTAAAGTAAAAWTAGCCACAGCTTKCAY | 1647 |
| | TGC | |
| L2:80 | CAATACGCAACCTAAAGTAAAAMCAGCCACAGCTTKCAY | 1648 |
| | TGC | |
| L2:81 | CAATACGCAACCTAAAGTAAAAWTGCRCACAGCTTKCAY | 1649 |
| | TGC | |
| L2:82 | CAATACGCAACCTAAAGTAAAAMCGCRCACAGCTTKCAY | 1650 |
| | TGC | |
| L2:83 | CAATACGCAACCTAAAGTAAAAWTAGCCACAGCACTCCW | 1651 |
| | TGC | |
| L2:84 | CAATACGCAACCTAAAGTAAAAMCAGCCACAGCACTCCW | 1652 |
| | TGC | |
| L2:85 | CAATACGCAACCTAAAGTAAAAWTGCRCACAGCACTCCW | 1653 |
| | TGC | |
| L2:86 | CAATACGCAACCTAAAGTAAAAMCGCRCACAGCACTCCW | 1654 |
| | TGC | |
| L2:87 | CAATACGCAACCTAAAGTAAAAWTAGCCACAGCTTKCCW | 1655 |
| | TGC | |
| L2:88 | CAATACGCAACCTAAAGTAAAAMCAGCCACAGCTTKCCW | 1656 |
| | TGC | |
| L2:89 | CAATACGCAACCTAAAGTAAAAWTGCRCACAGCTTKCCW | 1657 |
| | TGC | |
| L2:90 | CAATACGCAACCTAAAGTAAAAMCGCRCACAGCTTKCCW | 1658 |
| | TGC | |
| L2:91 | TGTTTCCCTTTCTTCTTTAGCGACTTGKCTCTCTTGATC | 1659 |
| | CMA | |
| L2:92 | TGTTTCCCTTTCTTCTTTAGCGACTTGCAKCTCTTGATC | 1660 |
| | CMA | |
| L2:93 | TGTTTCCCTTTCTTCTTTAGCGACTTGKCTCTCTTGATC | 1661 |
| | ARA | |
| L2:94 | TGTTTCCCTTTCTTCTTTAGCGACTTGCAKCTCTTGATC | 1662 |
| | ARA | |
| L2:95 | ACTAGCTTGTCGTAATAATGGCGGCATACTAKCAGTAGT | 1663 |
| | AGG | |
| L2:96 | CMAAGCTTGTCGTAATAATGGCGGCATACTAKCAGTAGT | 1664 |
| | AGG | |
| L2:97 | TACAGCTTGTCGTAATAATGGCGGCATACTAKCAGTAGT | 1665 |
| | AGG | |
| L2:98 | GAATAAGAAGGCTGGCTCTGCACCTTGGTGATCCAATAA | 1666 |
| | TTC | |
| L2:99 | GAATAAGAAGGCTGGCTCTGCACCTTGGTGATCTGMTAA | 1667 |
| | TTC | |
| L2:100 | GAATAAGAAGGCTGGCTCTGCACCTTGGTGATCCTTTAA | 1668 |
| | TTC | |
| L2:101 | TTTAAGTTGTTTTTCTAATCCGCATATGATCAATTCAAG | 1669 |
| | GCC | |
| L2:102 | GGGAACTTCGGCGCGCCTTAAGACCCACTTTCGSA | 1670 |

### Third Round Library Design and Screening

### Library L6: Shuffling for Enhanced Chlorsulfuron Response

[0322] Since clones L2-14 and L2-18 had the best chlorsulfuron activity profile from library L2, their amino acid diversity was used as the basis for the next round of shuffling. In addition to the diversity provided by these backbone sequences, additional residue changes thought to enhance packing of chlorsulfuron based on the 3D model predictions were included. New amino acid positions targeted were 67, 109, 112 and 173 (see, Table 12). Substitution of Gln (Q) at position 108 and Val (V) at position 170 were shown to likely be important changes in library L4 for gaining enhanced SU responsiveness and so were varied here as well. A summary of the diversity chose is shown in Table 12. The oligonucleotides designed and used to generate library 6 are shown in Table 13.

[0323] Library L6 was assembled, rescued, ligated into pVER7314, transformed into E. coli KM3 and plated out onto LB carbenicillin/kanamycin, and carbenicillin only control media as before. Library plates were then picked into 42 384-well microtiter plates (˜16,000 clones) containing 60 μl LB carbenicillin (Cb) broth per well. After overnight growth at 37° C. the cultures were stamped onto M9 assay plates containing no inducer, 0.2 ppm, and 2.0 ppm chlorsulfuron as test inducer. Following incubation at 30° C. for ˜48 hrs, putative hits responding to chlorsulfuron treatment as determined by increased blue colony color were re-arrayed into six 96-well microtiter plates and used to stamp a fresh set of M9 assay plates to confirm the above results. For a more detailed analysis of the relative induction by chlorsulfuron, digital photographs were taken of the plates after various time points of incubation at 30° C. and colony color intensity measured using the digital image analysis freeware program ImageJ (Rasband, US National Institutes of Health, Bethesda, Md., USA, rsb.info.nih.gov/ij/, 1997-2007). Using these results enabled ranking of clones in multiplex format by background activity (no inducer), activation with low or high level inducer application (blue color with inducer), and fold activation (activation divided by background). Activation studies using 0.2 μg/ml chlorsulfuron as inducer for the top set of clones shows an approximately 3 fold improvement in activation while obtaining lower un-induced levels of expression (Data not shown.) In addition to this analysis, DNA sequence information for most clones (490 clones) was obtained and the deduced polypeptides aligned with each other as well as with their corresponding activity information. From this analysis sequence-activity relationships were derived. (Data not shown.) Residues biased for improved activity are indicated in larger bold type. Briefly, C at position 100, and Q at positions 108 and 109 strongly correlated with activation, while R at position 138, L at position 170, and A or G at position 173 were highly preferred in clones with the lowest background activity. Though some positions were strongly biased, i.e., observed more frequently in the selected population, the entirety of introduced diversity was observed in the full hit population. This information will aid in the design of further libraries to improve responsiveness to chlorsulfuron.

TABLE 12

| Sequence | Amino acid residue position | | | | | | | | | | | | | | |
|---|---|---|---|---|---|---|---|---|---|---|---|---|---|---|---|
| Name | 60 | 64 | 67 | 82 | 86 | 100 | 105 | 108 | 109 | 112 | 113 | 116 | 134 | 138 | 139 |
| Library | | A | M | N | | C | | Q | M | S | | M | M | G | N |
| Diversity | | Q | Y | T | | W | | K | L | T | | Q | V | R | V |
| | | | F | | | | | | Q | A | | | | | |
| | | | L | | | | | | H | G | | | | | |
| | | | I | | | | | | | | | | | | |
| | | | V | | | | | | | | | | | | |
| wt reference | L | H | F | N | F | H | P | K | Q | T | L | Q | L | G | H |
| L2-14 | M | A | F | N | M | C | W | K | Q | T | A | M | V | R | V |
| L2-18 | M | Q | F | T | M | W | W | K | Q | T | A | Q | M | R | N |
| L6-1B03 | M | A | I | N | M | C | W | Q | Q | A | A | M | V | R | V |
| L6-2C09 | M | Q | Y | T | M | C | W | Q | L | T | A | Q | M | R | V |
| L6-2D07 | M | Q | F | T | M | C | W | Q | Q | T | A | M | M | R | V |
| L6-3H02 | M | A | Y | T | M | C | W | Q | H | S | A | M | V | R | V |
| L6-4D10 | M | Q | Y | N | M | C | W | K | Q | S | A | M | V | R | V |
| L6-5F05 | M | A | I | N | M | C | W | Q | Q | A | A | Q | V | R | V |
| L6-5G06 | M | Q | Y | N | M | C | W | Q | Q | T | A | Q | V | R | V |
| L6-5H06 | M | Q | I | N | M | C | W | K | Q | T | A | M | V | R | V |
| L6-5H12 | M | A | Y | N | M | C | W | K | Q | T | A | Q | M | R | V |
| L6-6F07 | M | A | L | T | M | C | W | Q | Q | S | A | M | M | R | V |
| Bias in top | | none | Y | N | | C | | Q | Q | none | | none | V | R | V |
| population | | | | | | | | | | | | | | | |

| Sequence | Amino acid residue position | | | | | | | | | | |
|---|---|---|---|---|---|---|---|---|---|---|---|
| Name | 147 | 151 | 164 | 170 | 173 | 174 | 177 | 178 | | | |
| Library | | S | | L | G | L | | | 0.2 ppm | Control | 0.2 ppm |
| Diversity | | L | | A | A | W | | | 48 hr | 84 hr | 48 hr/ |
| | | | | V | V | | | | | | Control |
| | | | | | | | | | | | 84 hr |
| wt reference | E | H | D | L | A | I | F | D | 5.2 | 5.3 | 1.0 |
| L2-14 | F | S | A | L | A | L | K | D | 11.8 | 6.6 | 1.8 |
| L2-18 | F | L | A | L | A | W | K | D | 5.9 | 5.7 | 1.0 |
| L6-1B03 | F | S | A | L | A | W | K | D | 30.0 | 6.6 | 4.6 |
| L6-2C09 | F | L | A | L | A | W | K | D | 13.6 | 5.2 | 2.6 |
| L6-2D07 | F | S | A | V | A | W | K | D | 20.0 | 5.8 | 3.4 |
| L6-3H02 | F | S | A | V | A | W | K | V | 15.8 | 5.6 | 2.8 |
| L6-4D10 | F | S | A | L | A | W | K | D | 18.4 | 5.0 | 3.7 |
| L6-5F05 | F | L | A | L | A | W | K | D | 22.0 | 5.4 | 4.1 |
| L6-5G06 | F | L | A | L | G | W | K | D | 34.4 | 7.0 | 4.9 |
| L6-5H06 | F | L | A | V | A | W | K | D | 13.7 | 5.1 | 2.7 |
| L6-5H12 | F | L | A | V | A | W | K | D | 23.7 | 5.7 | 4.2 |
| L6-6F07 | F | S | A | L | A | W | K | D | 11.6 | 5.1 | 2.3 |
| Bias in top | | none | | L | A/G | W | | D | | | |
| population | | | | | | | | | | | |

TABLE 13

| Oligo | Sequence | SEQ ID |
|---|---|---|
| L6:1 | TATTGGCATGTAAAAAATAAGCGAGCTCTGCTCGACG | 1671 |
| | CCTTA | |
| L6:2 | GCAGAGCCAGCCTTCTTATTCGGCCTTGAATTGATCA | 1672 |
| | TATGC | |
| L6:3 | ATATAATGCATTCTCTAGTGAAAAACCTTGTTGGCAT | 1673 |
| | AAAAA | |
| L6:4 | TTTAAGTTGTTTTTCTAATCCGCATATGATCAATTCA | 1674 |
| | AGGCC | |
| L6:5 | TTAGAAGGGGAAAGCTGGCAAGATTTTTTACGTAATA | 1675 |
| | MTGCT | |
| L6:6 | TAAAGCACATCTCATACTTTTAGCAKTATTACGTAAA | 1676 |
| | AAATC | |
| L6:7 | TTGCCAGCTTTCCCCTTCTAAAGGGCAMAHGTGAGTT | 1677 |
| | GCGTG | |
| L6:8 | TTGCCAGCTTTCCCCTTCTAAAGGGCAATAGTGAGTT | 1678 |
| | GCGTG | |
| L6:9 | GAATAAGAAGGCTGGCTCTGCACCTTGGTGATCCTTT | 1679 |
| | AATTC | |
| L6:10 | GCCATTGAGATGATGGATAGGCACGCAACTCACTATT | 1680 |
| | GCCCT | |
| L6:11 | RSTGCTGAAAATATGTTAGCCTTTTTATGCCAACAAG | 1681 |
| | GTTTT | |
| L6:12 | TTTACTTTAGGTTGCGTATTGTTTGATCAAGAGCTCC | 1682 |
| | AAGTC | |
| L6:13 | TGTTTCCCTTTCTTCTTTAGCGACTTGGAGCTCTTGA | 1683 |
| | TCAAA | |
| L6:14 | GCCATTGAGATGATGGATAGGCACGCAACTCACDTKT | 1684 |
| | GCCCT | |
| L6:15 | GCCATTGAGATGATGGATAGGCACCAAACTCACDTKT | 1685 |
| | GCCCT | |
| L6:16 | GCCATTGAGATGATGGATAGGCACCAAACTCACTATT | 1686 |
| | GCCCT | |
| L6:17 | AAAAGTATGAGATGTGCTTTACTAAGCCATCGCGATG | 1687 |
| | GAGCA | |
| L6:18 | AAAGTATGKTTAGGTACACGCTGGACAGAAMAACAWT | 1688 |
| | ATGAA | |
| L6:19 | AAAGTATGKTTAGGTACACGCTGGACAGAAMAAWTGT | 1689 |
| | ATGAA | |
| L6:20 | RSTGCTGAAAATCAATTAGCCTTTTTATGCCAACAAG | 1690 |
| | GTTTT | |
| L6:21 | TCACTAGAGAATGCATTATATGCARTGAGTGCGTGGR | 1691 |
| | GGGTG | |
| L6:22 | TCACTAGAGAATGCATTATATGCARTGAGTGCGTGGR | 1692 |
| | GGAAC | |
| L6:23 | TTTACTTTAGGTTGCGTATTGTTTGATCAAGAGAGCC | 1693 |
| | AAGTC | |
| L6:24 | GCTAAAGAAGAAAGGGAAACACCTACTACTGCTAGTA | 1694 |
| | TGCCG | |
| L6:25 | CCATTAKTGCGACAAGBTTKGGAATTAAAGGATCACC | 1695 |
| | AAGGT | |
| L6:26 | CCATTAGCCCGACAAGBTTKGGAATTAAAGGATCACC | 1696 |
| | AAGGT | |
| L6:27 | GGATTAGAAAAACAACTTAAATGCGAAAGTGGGTCTT | 1697 |
| | AA | |
| L6:28 | CCTATCCATCATCTCAATGGCTAAGGCGTCGAGCAGA | 1698 |
| | GCTCG | |
| L6:29 | TTGCCAGCTTTCCCCTTCTAAAGGGCAMAHGTGAGTT | 1699 |
| | TGGTG | |
| L6:30 | TTGCCAGCTTTCCCCTTCTAAAGGGCAATAGTGAGTT | 1700 |
| | TGGTG | |
| L6:31 | GCGTGTACCTAAMCATACTTTTGCTCCATCGCGATGG | 1701 |
| | CTTAG | |
| L6:32 | GGCTAACATATTTTCAGCASYTTCATAWTGTTKTTCT | 1702 |
| | GTCCA | |
| L6:33 | GGCTAATTGATTTTCAGCASYTTCATAWTGTTKTTCT | 1703 |
| | GTCCA | |
| L6:34 | GGCTAACATATTTTCAGCASYTTCATACAWTTKTTCT | 1704 |
| | GTCCA | |
| L6:35 | GGCTAATTGATTTTCAGCASYTTCATACAWTTKTTCT | 1705 |
| | GTCCA | |
| L6:36 | CAATACGCAACCTAAAGTAAACACCCYCACAGCACTC | 1706 |
| | AYTGC | |
| L6:37 | CAATACGCAACCTAAAGTAAAGTTCCYCACAGCACTC | 1707 |
| | AYTGC | |
| L6:38 | TGTTTCCCTTTCTTCTTTAGCGACTTGGCTCTCTTGA | 1708 |
| | TCAAA | |
| L6:39 | CMAAVCTTGTCGCAMTAATGGCGGCATACTAGCAGTA | 1709 |
| | GTAGG | |
| L6:40 | CMAAVCTTGTCGGGCTAATGGCGGCATACTAGCAGTA | 1710 |
| | GTAGG | |
| L6:41 | GGGAACTTCGGCGCGCCTTAAGACCCACTTTCGCA | 1711 |

### B. Fourth Round Shuffling:

[0324] Library L8 construction and screening. Fourth round shuffling incorporated the best diversity from Rd3 shuffling (BB1860) as well as computational diversity (Table 14). The fully synthetic library was constructed from oligonucleotides shown in Tables 15A and 15B. As diversity was very high the library oligo mix was spiked into the parental hit variant oligo mix (5, 10, and 25% mixes) to titer down the number of residue changes per clone. In addition, to varying residues for Cs activity, seven residues (C68, C86, C88, C121, C144, C195, and C203) were varied with TetR family phylogenetic substitutions in an attempt to reduce the number of cysteine residues in the repressor. The PCR assembled libraries were cloned Sac1/Asc1 into pVER7334. This plasmid encodes P_{BAD} promoter controlled expression of a plant optimized TetR DNA binding domain fused to the wt ligand binding domain of TetR(B) encoded by native Tn10 sequence on a Sac1 to Asc1 fragment. Approximately 15,000 clones were screened for blue colony color on the M9 Xgal assay plates +/−200 ppb Chlorsulfuron (Cs). Clones were ranked by ratio of color with inducer after 24 hrs incubation over colony color without inducer for 48 hrs of incubation. The sequence trend in the overall larger population of hits (first re-array) was that L55, R104, W105 and L170 were maintained while the C144A substitution was highly preferred. Sequence trends within the hit population were then noted with respect to repression, induction and fold induction (which corrects for leakiness). For repression C68L and C144A are favored in the highly repressed population: 57% and 93% in the top 40 repressed clones vs. 35% and 66% for the remaining 209 clones, respectively. the sequence analysis reveals that substitutions V134L and S135 to E, D, T, or Q were overrepresented. A sequence alignment of the top 20 clones is shown in Table 16.

TABLE 14
Library diversity summary for fourth, fifth and
sixth round Chlorsulfuron repressor shuffling.

| Sequence | TetR(B) | | | |
|---|---|---|---|---|
| position | Sequence | L8 | CsL3 | CsL4.2 |
| 55 | L | [symbol] | — | — |
| 60 | L | ML | HMN | [symbol] |
| 64 | H | QILV | [symbol] | [symbol] |
| 67 | F | Y | | — |
| 68 | C | LSC | L | L |
| 78 | F | — | — | [symbol] |
| 82 | N | NLIV | [symbol] | FY |
| 86 | F | WFYILMC | [symbol] | M |
| 88 | C | RNC | R | CLR |
| 100 | H | WMVC | AS | AS |
| 104 | R | [symbol] | R | R |
| 105 | P | [symbol] | W | W |
| 108 | K | Q | — | — |
| 112 | T | ST | — | — |
| 113 | L | AV | [symbol] | A |
| 116 | Q | M | [symbol] | M |
| 117 | L | ML | — | — |
| 121 | C | TC | T | T |
| 131 | L | ML | — | — |
| 134 | L | [symbol] | [symbol] | T |
| 135 | S | [symbol] | [symbol] | DS |
| 137 | V | AV | — | — |
| 138 | G | R | [symbol] | R |
| 139 | H | IV | [symbol] | V |
| 144 | C | [symbol] | A | A |
| 147 | E | LGKCRFWV | [symbol] | [symbol] |
| 151 | H | S | GQS | [symbol] |
| 155 | K | — | — | KN |
| 163 | T | — | — | PT |
| 165 | S | — | — | RS |
| 170 | L | [symbol] | L | — |
| 173 | A | — | — | — |
| 174 | I | W | W | W |
| 177 | F | QK | K | K |
| 178 | D | — | — | [symbol] |
| 195 | C | SRAC | A | A |
| 203 | C | SRAC | R | R |

TABLE 15A
Library L8 assembly oligonucleotides

| | SEQ ID | | |
|---|---|---|---|
| Oligo | NO | Sequence | Group |
| L8:1 | 1712 | CACACAGGAATCCATGGCCAGACTCGACAAGAGCAAGGTG | 1 |
| L8:2 | 1713 | ATCAACAGCGCACTGGAGCTGCTGAACGAGGTCGGAATCGAA | 2 |
| L8:3 | 1714 | GGCCTCACAACCCGTAAACTCGCCCAGAAGCTCGGGGTAGAG | 3 |
| L8:4 | 1715 | CAGCCTACATTGTATTGGCACGTCAAGAACAAGCGAGCTCTG | 4 |
| L8:5 | 1716 | CTAGACGCCWTGGCCATTGAGATGWTGGATAGGCACCAWACC | 5 |
| L8:6 | 1717 | CTAGACGCCWTGGCCATTGAGATGWTGGATAGGCACVTTACC | |
| L8:7 | 1718 | CACTACTGCCCTTTGGAAGGGGAAAGCTGGCAAGACTTCTTG | 6 |
| L8:8 | 1719 | AGGAACAACGCTAAGAGCWTSAGATGTGCTTTGCTCAGTCAC | 7 |
| L8:9 | 1720 | AGGAACAACGCTAAGAGCTGGAGATGTGCTTTGCTCAGTCAC | |
| L8:10 | 1721 | AGGAACAACGCTAAGAGCTACAGATGTGCTTTGCTCAGTCAC | |
| L8:11 | 1722 | AGGAACVTTGCTAAGAGCWTSAGATGTGCTTTGCTCAGTCAC | |
| L8:12 | 1723 | AGGAACVTTGCTAAGAGCTGGAGATGTGCTTTGCTCAGTCAC | |
| L8:13 | 1724 | AGGAACVTTGCTAAGAGCTACAGATGTGCTTTGCTCAGTCAC | |
| L8:14 | 1725 | CGTGATGGAGCCAAGGTCTGSCTAGGTACAGCGTKGACGGAG | 8 |
| L8:15 | 1726 | CGTGATGGAGCCAAGGTCTGSCTAGGTACAGCGTWCACGGAG | |
| L8:16 | 1727 | CGTGATGGAGCCAAGGTCTGSCTAGGTACASGGTKGACGGAG | |
| L8:17 | 1728 | CGTGATGGAGCCAAGGTCTGSCTAGGTACASGGTWCACGGAG | |
| L8:18 | 1729 | CGTGATGGAGCCAAGGTCRTGCTAGGTACAGCGTKGACGGAG | |
| L8:19 | 1730 | CGTGATGGAGCCAAGGTCRTGCTAGGTACAGCGTWCACGGAG | |
| L8:20 | 1731 | CGTGATGGAGCCAAGGTCRTGCTAGGTACASGGTKGACGGAG | |
| L8:21 | 1732 | CGTGATGGAGCCAAGGTCRTGCTAGGTACASGGTWCACGGAG | |
| L8:22 | 1733 | CAACAGTATGAAWCTGYGGAGAACATGWTGGCCTTCCTGTGC | 9 |
| L8:23 | 1734 | CAACAAGGTTTCTCCCTTGAGAATGCCWTGTACGCAVTCDCG | 10 |
| L8:24 | 1735 | CAACAAGGTTTCTCCCTTGAGAATGCCWTGTACGCAVTCMAG | |
| L8:25 | 1736 | CAACAAGGTTTCTCCCTTGAGAATGCCWTGTACGCAVTCYGC | |
| L8:26 | 1737 | CAACAAGGTTTCTCCCTTGAGAATGCCWTGTACGCAVTCGAM | |
| L8:27 | 1738 | GCTGYGCGGRTTTTCACTCTGGGTTGCGTATTGBKGGATCAA | 11 |
| L8:28 | 1739 | GCTGYGCGGRTTTTCACTCTGGGTTGCGTATTGAAGGATCAA | |
| L8:29 | 1740 | GCTGYGCGGRTTTTCACTCTGGGTTGCGTATTGTKTGATCAA | |
| L8:30 | 1741 | GAGTCCCAAGTCGCTAAGGAGGAGAGGGAAACACCTACTACT | 12 |
| L8:31 | 1742 | GATAGTATGCCGCCACTGMTTCGACAAGCTTGGGAACTCMAA | 13 |
| L8:32 | 1743 | GATCACCAAGGTGCAGAGCCAGCCTTCCTGTTCGGCCTTGAA | 14 |
| L8:33 | 1744 | TTGATCATATGCGGATTGGAGAAGCAGCTGAAGTGTGAAAGT | 15 |
| L8:34 | 1745 | GGGTCTTAAGGCGCGCCGAAGTTCCC | 16 |
| L8:35 | 1746 | CAGCTCCAGTGCGCTGTTGATCACCTTGCTCTTGTCGAGTCT | 17 |
| L8:36 | 1747 | GAGTTTACGGGTTGTGAGGCCTTCGATTCCGACCTCGTTCAG | 18 |
| L8:37 | 1748 | GTGCCAATACAATGTAGGCTGCTCTACCCCGAGCTTCTGGGC | 19 |
| L8:38 | 1749 | CTCAATGGCCAWGGCGTCTAGCAGAGCTCGCTTGTTCTTGAC | 20 |
| L8:39 | 1750 | CCCTTCCAAAGGGCAGTAGTGGGTWTGGTGCCTATCCAWCAT | 21 |
| L8:40 | 1751 | CCCTTCCAAAGGGCAGTAGTGGGTAABGTGCCTATCCAWCAT | |
| L8:41 | 1752 | SAWGCTCTTAGCGTTGTTCCTCAAGAAGTCTTGCCAGCTTTC | 22 |
| L8:42 | 1753 | CCAGCTCTTAGCGTTGTTCCTCAAGAAGTCTTGCCAGCTTTC | |
| L8:43 | 1754 | GTAGCTCTTAGCGTTGTTCCTCAAGAAGTCTTGCCAGCTTTC | |
| L8:44 | 1755 | SAWGCTCTTAGCAABGTTCCTCAAGAAGTCTTGCCAGCTTTC | |
| L8:45 | 1756 | CCAGCTCTTAGCAABGTTCCTCAAGAAGTCTTGCCAGCTTTC | |
| L8:46 | 1757 | GTAGCTCTTAGCAABGTTCCTCAAGAAGTCTTGCCAGCTTTC | |
| L8:47 | 1758 | SCAGACCTTGGCTCCATCACGGTGACTGAGCAAAGCACATCT | 23 |
| L8:48 | 1759 | CAYGACCTTGGCTCCATCACGGTGACTGAGCAAAGCACATCT | |
| L8:49 | 1760 | CTCCRCAGWTTCATACTGTTGCTCCGTCMACGCTGTACCTAG | 24 |
| L8:50 | 1761 | CTCCRCAGWTTCATACTGTTGCTCCGTGWACGCTGTACCTAG | |
| L8:51 | 1762 | CTCCRCAGWTTCATACTGTTGCTCCGTCMACCSTGTACCTAG | |
| L8:52 | 1763 | CTCCRCAGWTTCATACTGTTGCTCCGTGWACCSTGTACCTAG | |
| L8:53 | 1764 | CTCAAGGGAGAAACCTTGTTGGCACAGGAAGGCCAWCATGTT | 25 |
| L8:54 | 1765 | CAGAGTGAAAAYCCGCRCAGCCGHGABTGCGTACAWGGCATT | 26 |
| L8:55 | 1766 | CAGAGTGAAAAYCCGCRCAGCCTKGABTGCGTACAWGGCATT | |
| L8:56 | 1767 | CAGAGTGAAAAYCCGCRCAGCGCRGABTGCGTACAWGGCATT | |
| L8:57 | 1768 | CAGAGTGAAAAYCCGCRCAGCKTCGABTGCGTACAWGGCATT | |
| L8:58 | 1769 | CTCCTTAGCGACTTGGGACTCTTGATCCMVCAATACGCAACC | 27 |
| L8:59 | 1770 | CTCCTTAGCGACTTGGGACTCTTGATCCTTCAATACGCAACC | |
| L8:60 | 1771 | CTCCTTAGCGACTTGGGACTCTTGATCAMACAATACGCAACC | |
| L8:61 | 1772 | AAKCAGTGGCGGCATACTATCAGTAGTAGGTGTTTCCCTCTC | 28 |
| L8:62 | 1773 | TGGCTCTGCACCTTGGTGATCTTKGAGTTCCCAAGCTTGTCG | 29 |
| L8:63 | 1774 | CTCCAATCCGCATATGATCAATTCAAGGCCGAACAGGAAGGC | 30 |
| L8:64 | 1775 | CTTCGGCGCGCCTTAAGACCCACTTTCACACTTCAGCTGCTT | 31 |

TABLE 15B
Oligonucleotide mixes encoding parent clone for library L8.

| | SEQ | | |
|---|---|---|---|
| Oligo | ID NO | Oligo Sequence | Group |
| L6-4D10:01 | 1776 | CAGCCTACATTGTATTGGCACGTCAAGAACAAGCGAGCTCTG | 4 |
| L6-4D10:02 | 1777 | CTAGACGCCTTGGCCATTGAGATGATGGATAGGCACCAAACC | 5 |
| L6-4D10:03 | 1778 | CACTACTYGCCTTTGGAAGGGGAAAGCTGGCAAGACTTCTTG | 6 |
| L6-4D10:04 | 1779 | AGGAACAACGCTAAGAGCTGCAGACGTGCTTTGCTCAGTCAC | 7 |
| L6-4D10:05 | 1780 | AGGAACAACGCTAAGAGCTGCAGAAATGCTTTGCTCAGTCAC | |
| L6-4D10:06 | 1781 | CGTGATGGAGCCAAGGTCTGCCTAGGTACACGGTGGACGGAG | 8 |
| L6-4D10:07 | 1782 | CAACAGTATGAATCTGCGGAGAACATGTTGGCCTTCCTGACC | 9 |
| L6-4D10:08 | 1783 | CAACAAGGTTTCTCCCTTGAGAATGCCTTGTACGCAGTCTCC | 10 |
| L6-4D10:09 | 1784 | GCTGTGCGGGTTTTCACTCTGGGTTGGGTATTGTTCGATCAA | 11 |
| L6-4D10:10 | 1785 | GCTGTGCGGGTTTTCACTCTGGGTGCCGTATTGTTCGATCAA | |
| L6-4D10:11 | 1786 | GAGTCCCAAGTCGCTAAGGAGGAGAGGGAAACACCTACTACT | 12 |
| L6-4D10:12 | 1787 | GATAGTATGCCGCCACTGCTTCGACAAGCTTGGGAACTCAAA | 13 |
| L6-4D10:13 | 1788 | GATCACCAAGGTGCAGAGCCAGCCTTCCTGTTCGGCCTTGAA | 14 |
| L6-4D10:14 | 1789 | TTGATCATAKCCGGATTGGAGAAGCAGCTGAAGKCAGAAAGT | 15 |
| L6-4D10:15 | 1790 | TTGATCATAKCCGGATTGGAGAAGCAGCTGAAGAGAGAAAGT | |
| L6-4D10:16 | 1791 | TTGATCATACGCGGATTGGAGAAGCAGCTGAAGKCAGAAAGT | |
| L6-4D10:17 | 1792 | TTGATCATACGCGGATTGGAGAAGCAGCTGAAGAGAGAAAGT | |
| L6-4D10:18 | 1793 | GGGTCTTAATGATAGCTGCAGAAGGTACCTTGGCGCGCC | 16 |
| L6-4D10:19 | 1794 | CTCAATGGCCAAGGCGTCTAGCAGAGCTCGCTTGTTCTTGAC | 20 |
| L6-4D10:20 | 1795 | CCCTTCCAAAGGCRAGTAGTGGGTTTGGTGCCTATCCATCAT | 21 |
| L6-4D10:21 | 1796 | GCAGCTCTTAGCGTTGTTCCTCAAGAAGTCTTGCCAGCTTTC | 22 |
| L6-4D10:22 | 1797 | GCAGACCTTGGCTCCATCACGGTGACTGAGCAAAGCACGTCT | 23 |
| L6-4D10:23 | 1798 | GCAGACCTTGGCTCCATCACGGTGACTGAGCAAAGCATTTCT | |
| L6-4D10:24 | 1799 | CTCCGCAGATTCATACTGTTGCTCCGTCCACCGTGTACCTAG | 24 |
| L6-4D10:25 | 1800 | CTCAAGGGAGAAACCTTGTTGGGTCAGGAAGGCCAACATGTT | 25 |
| L6-4D10:26 | 1801 | CAGAGTGAAAACCCGCACAGCGGAGACTGCGTACAAGGCATT | 26 |
| L6-4D10:27 | 1802 | CTCCTTAGCGACTTGGGACTCTTGATCGAACAATACCCAACC | 27 |
| L6-4D10:28 | 1803 | CTCCTTAGCGACTTGGGACTCTTGATCGAACAATACGGCACC | |
| L6-4D10:29 | 1804 | AAGCAGTGGCGGCATACTATCAGTAGTAGGTGTTTCCCTCTC | 28 |
| L6-4D10:30 | 1805 | TGGCTCTGCACCTTGGTGATCTTTGAGTTCCCAAGCTTGTCG | 29 |
| L6-4D10:31 | 1806 | CTCCAATCCGGMTATGATCAATTCAAGGCCGAACAGGAAGGC | 30 |
| L6-4D10:32 | 1807 | CTCCAATCCGCGTATGATCAATTCAAGGCCGAACAGGAAGGC | |
| L6-4D10:33 | 1808 | CTGCAGCTATCATTAAGACCCACTTTCTGMCTTCAGCTGCTT | 31 |
| L6-4D10:34 | 1809 | CTGCAGCTATCATTAAGACCCACTTTCTCTCTTCAGCTGCTT | |

TABLE 16
Sequence alignment and relative performance of the top
20 L8 hits relative to parent clone L6-4D10.

| | Colony Assay | | | Residue and | | | | | | | | | | | | | |
|---|---|---|---|---|---|---|---|---|---|---|---|---|---|---|---|---|---|
| | Results | | | Sequence Position | | | | | | | | | | | | | |
| Clone | IND | REP | F. IND | 60 | 64 | 67 | 68 | 86 | 88 | 90 | 100 | 105 | 108 | 112 | 113 | 116 | 121 |
| TetR | ND | ND | ND | L | H | F | — | F | — | — | H | P | — | T | L | Q | — |
| L6-4D10 | 0.2 | 0.6 | 0.4 | M | Q | Y | C | C | C | L | C | W | K | S | A | M | C |
| L8-3F09 | 5.6 | 0.6 | 9.7 | — | — | — | S | L | — | — | — | — | Q | — | — | — | T |
| L8-1A04 | 12.2 | 2.0 | 6.2 | — | — | — | L | C | N | — | — | — | Q | T | — | — | T |
| L8-3B08 | 13.0 | 2.1 | 6.1 | — | — | — | S | L | — | — | — | — | Q | — | — | — | T |
| L8-1B12 | 12.5 | 2.4 | 5.1 | — | — | — | S | W | — | — | — | — | Q | — | — | — | T |
| L8-3D03 | 5.9 | 1.2 | 4.9 | — | — | — | L | C | N | — | — | — | Q | — | — | — | T |
| L8-2F12 | 2.7 | 0.7 | 3.6 | — | — | — | S | C | N | — | — | — | Q | — | — | — | T |
| L8-3F02 | 3.4 | 1.0 | 3.5 | — | — | — | S | C | R | — | — | — | Q | — | — | — | — |
| L8-3E05 | 1.4 | 0.4 | 3.4 | — | — | — | — | L | — | — | — | — | Q | — | — | — | T |
| L8-3A05 | 0.3 | 0.1 | 3.3 | — | — | — | S | C | N | — | — | — | Q | — | — | — | T |
| L8-3A04 | 0.5 | 0.1 | 3.3 | — | — | — | S | C | R | — | — | — | Q | — | — | — | T |
| L8-1A03 | 8.6 | 2.8 | 3.1 | — | — | — | S | C | N | — | — | — | Q | — | — | — | T |
| L8-3F01 | 1.7 | 0.6 | 3.0 | — | — | — | L | C | R | — | — | — | Q | T | — | — | T |
| L8-3A07 | 0.7 | 0.2 | 2.9 | — | — | — | S | M | — | — | — | — | Q | — | — | — | T |
| L8-1A06 | 2.1 | 0.8 | 2.7 | — | — | — | S | C | R | V | — | — | Q | — | — | — | T |
| L8-2H01 | 12.9 | 4.8 | 2.7 | — | — | — | S | C | R | — | — | — | Q | — | — | — | T |
| L8-3F08 | 1.5 | 0.6 | 2.7 | — | — | — | S | C | N | — | V | — | Q | — | — | — | T |
| L8-3A06 | 0.3 | 0.1 | 2.6 | — | — | — | L | C | N | — | — | — | Q | — | — | — | T |
| L8-1E04 | 1.5 | 0.6 | 2.5 | — | — | — | L | C | N | — | — | — | Q | — | — | — | T |
| L8-1A05 | 10.8 | 4.4 | 2.5 | — | — | — | S | C | R | — | — | — | Q | — | — | — | T |
| L8-3B03 | 0.6 | 0.3 | 2.4 | — | — | — | L | C | R | — | — | — | Q | — | — | — | T |

| | Residue and | | | | | | | | | | | | | | |
|---|---|---|---|---|---|---|---|---|---|---|---|---|---|---|---|
| | Sequence Position | | | | | | | | | | | | | | |
| Clone | 131 | 134 | 135 | 137 | 138 | 139 | 144 | 147 | 151 | 164 | 174 | 177 | 195 | 203 | 205 |
| TetR | — | L | — | — | G | H | — | E | H | D | I | F | — | — | — |
| L6-4D10 | L | V | S | V | R | V | C | F | S | A | W | K | C | C | S |
| L8-3F09 | — | L | T | — | — | — | W | — | — | D | — | — | A | R | — |
| L8-1A04 | — | L | E | A | — | — | A | — | — | D | — | — | S | R | — |
| L8-3B08 | — | — | D | A | — | — | W | — | — | D | — | — | R | R | — |
| L8-1B12 | — | L | E | — | — | — | W | — | — | D | — | — | A | A | — |
| L8-3D03 | — | L | D | — | — | — | A | — | — | D | — | — | R | S | — |
| L8-2F12 | — | L | Q | — | — | — | W | — | — | D | — | — | R | S | — |
| L8-3F02 | — | — | — | — | — | I | A | — | — | D | — | — | A | R | — |
| L8-3E05 | — | L | Q | — | — | I | — | — | — | D | — | — | R | R | — |
| L8-3A05 | — | — | — | — | — | — | A | — | — | D | — | — | S | S | — |
| L8-3A04 | — | — | — | — | — | — | A | — | — | D | — | — | R | R | C |
| L8-1A03 | — | L | D | — | — | — | A | — | — | D | — | — | A | R | — |
| L8-3F01 | — | — | — | — | — | — | A | — | — | D | — | — | A | R | — |
| L8-3A07 | — | — | — | — | — | — | W | — | — | D | — | — | A | R | — |
| L8-1A06 | — | — | — | — | — | — | A | — | — | D | — | — | A | R | — |
| L8-2H01 | — | L | E | — | — | — | A | — | — | D | — | — | R | R | — |
| L8-3F08 | M | L | E | A | — | I | W | — | — | D | — | — | R | S | — |
| L8-3A06 | — | — | — | — | — | — | A | — | — | D | — | — | S | R | — |
| L8-1E04 | — | — | — | — | — | — | A | Y | — | D | — | — | R | A | — |
| L8-1A05 | — | — | D | — | — | — | A | — | — | D | — | — | A | A | — |
| L8-3B03 | — | — | — | — | — | — | A | — | — | D | — | — | R | S | — |

Clones ranked by blue colony color intensity thru ImageJ analysis.
IND = induction with 200 ppb Cs at 24 hrs
REP = repression measured without inducer after 48 hrs
F. IND = fold induction: induction with 200 ppb Cs at 24 hrs/repression at 48 hrs

### C. Fifth Round Chlorsulfuron Repressor Shuffling

[0325] Saturation Mutagenesis of Ligand Binding Pocket:

[0326] To generate novel diversity for further rounds of shuffling residues 60, 64, 82, 86, 100, 104, 105, 113, 116, 134, 135, 138, 139, 147, 151, 174, and 177 in L8 hit L8-3F01 were subjected to NNK substitution mutagenesis with the following primers shown in Table 17.

TABLE 17
Oligonucleotides used for saturation mutagenesis of
putative ligand binding pocket residues.

| | Residue/ | | SEQ ID |
|---|---|---|---|
| Oligo | Strand | Sequence | NO |
| 3F1-60T | 60 top | CCTTGGCCATTGAGATGNNKGATAGGCACCAAACCCACTAC | 1810 |
| 3F1-60B | 60 bottom | GTAGTGGGTTTGGTGCCTATCMNNCATCTCAATGGCCAAGG | 1811 |
| 3F1-64T | 64 top | GAGATGATGGATAGGCACNNKACCCACTACTTGCCTTTG | 1812 |
| 3F1-64B | 64 bottom | CAAAGGCAAGTAGTGGGTMNNGTGCCTATCCATCATCTC | 1813 |
| 3F1-82T | 60 top | CAAGACTTCTTGAGGAACNNKGCTAAGAGCTGCAGACGTG | 1814 |
| 3F1-82B | 82 bottom | CACGTCTGCAGCTCTTAGCMNNGTTCCTCAAGAAGTCTTG | 1815 |
| 3F1-86T | 86 top | GAGGAACAACGCTAAGAGCNNKAGACGTGCTTTGCTCAGTC | 1816 |
| 3F1-86B | 86 bottom | GACTGAGCAAAGCACGTCTMNNGCTCTTAGCGTTGTTCCTC | 1817 |
| 3F1-100T | 100 top | CGTGATGGAGCCAAGGTCNNKCTAGGTACACGGTGGACG | 1818 |
| 3F1-100B | 100 bottom | CGTCCACCGTGTACCTAGMNNGACCTTGGCTCCATCACG | 1819 |
| 3F1-104T | 104 top | CAAGGTCTGCCTAGGTACANNKTGGACGGAGCAACAGTATG | 1820 |
| 3F1-104B | 104 bottom | CATACTGTTGCTCCGTCCAMNNTGTACCTAGGCAGACCTTG | 1821 |
| 3F1-105T | 105 top | GTCTGCCTAGGTACACGGNNKACGGAGCAACAGTATGAAAC | 1822 |
| 3F1-105B | 105 bottom | GTTTCATACTGTTGCTCCGTMNNCCGTGTACCTAGGCAGAC | 1823 |
| 3F1-113T | 113 top primer | GAGCAACAGTATGAAACTNNKGAGAACATGTTGGCCTTCC | 1824 |
| 3F1-113B | 113 bottom | GGAAGGCCAACATGTTCTCMNNAGTTTCATACTGTTGCTC | 1825 |
| 3F1-116T | 116 top | GTATGAAACTGCGGAGAACNNKTTGGCCTTCCTGACCCAAC | 1826 |
| 3F1-116B | 116 bottom | GTTGGGTCAGGAAGGCCAAMNNGTTCTCCGCAGTTTCATAC | 1827 |
| 3F1-134T | 134 top | GAGAATGCCTTGTACGCANNKTCCGCTGTGCGGGTTTTCAC | 1828 |
| 3F1-134B | 134 bottom | GTGAAAACCCGCACAGCGGAMNNTGCGTACAAGGCATTCTC | 1829 |
| 3F1-135T | 135 top | GAATGCCTTGTACGCAGTCNNKGCTGTGCGGGTTTTCACTC | 1830 |
| 3F1-135B | 135 bottom | GAGTGAAAACCCGCACAGCMNNGACTGCGTACAAGGCATTC | 1831 |
| 3F1-138T | 138 top | GTACGCAGTCTCCGCTGTGNNKGTTTTCACTCTGGGTGCC | 1832 |
| 3F1-138B | 138 bottom | GGCACCCAGAGTGAAAACMNNCACAGCGGAGACTGCGTAC | 1833 |
| 3F1-139T | 139 top | ACGCAGTCTCCGCTGTGCGGNNKTTCACTCTGGGTGCCGTA | 1834 |
| 3F1-139B | 139 bottom | TACGGCACCCAGAGTGAAMNNCCGCACAGCGGAGACTGCGT | 1835 |
| 3F1-147T | 147 top | CACTCTGGGTGCCGTATTGNNKGATCAAGAGTCCCAAGTC | 1836 |
| 3F1-147B | 147 bottom | GACTTGGGACTCTTGATCMNNCAATACGGCACCCAGAGTG | 1837 |
| 3F1-151T | 151 top | CGTATTGTTCGATCAAGAGNNKCAAGTCGCTAAGGAGGAGAG | 1838 |
| 3F1-151B | 151B | CTCTCCTCCTTAGCGACTTGMNNCTCTTGATCGAACAATACG | 1839 |
| 3F1-174T | 174 top | GCCACTGCTTCGACAAGCTNNKGAACTCAAAGATCACCAAG | 1840 |
| 3F1-174B | 174 bottom | CTTGGTGATCTTTGAGTTCMNNAGCTTGTCGAAGCAGTGGC | 1841 |
| 3F1-177T | 177 top | TCGACAAGCTTGGGAACTCNNKGATCACCAAGGTGCAGAGC | 1842 |
| 3F1-177B | 177 bottom | GCTCTGCACCTTGGTGATCMNNGAGTTCCCAAGCTTGTCGA | 1843 |

[0327] Mutagenesis reactions were transformed into library strain Km3 and 96 colonies tested for substitution by DNA sequence analysis. Substitutions representing each possible residue at each position were then re-arrayed in triplicate onto M9 X-gal assay plates with 0, 20 and 200 ppb Chlorsulfuron. Plates were incubated at 37° C. for 24 and 48 hrs prior to imaging. Residue substitutions were then ranked by activation (emphasis on 20 ppb Cs) and repression characteristics (emphasis on 48 hr time point). The mutation with the greatest impact on activity was substitution of residue N82 to phenylalanine or tyrosine. Tryptophan substitution also improved activity at N82 but not nearly as much as either phe or tyr. Substitutions S135D, S135E, F147Q, F147V and S151Q all dramatically increase sensitivity to Chlorsulfuron induction however partially at the expense of repressor function. All other preferred substitutions shown in Table 18 either improved repression or improved sensitivity to inducer without compromising repressor function. Certain residues were indispensible to function such as R104, W105, and W174 as substitutions were not allowed. Other residue positions such as R138 and K177 were also flagged as critical since functional substitutions were extremely limited.

TABLE 18
Summary of saturation mutagenesis results.

| | Residue targeted for mutagenesis | | | | | | | | | | | | | | | | |
|---|---|---|---|---|---|---|---|---|---|---|---|---|---|---|---|---|---|
| | M60 | Q64 | N82 | C86 | C100 | R104 | W105 | A113 | M116 | V134 | S135 | R138 | V139 | F147 | S151 | W174 | K177 |
| Top | H | D | [symbol] | G | A | [symbol] | [symbol] | A | L | L | D | H | I | F | G | [symbol] | [symbol] |
| Substitutions | M | E | [symbol] | M | C | | | G | M | T | E | [symbol] | L | L | Q | | R |
| | N | G | | ST | S | | | V | Q | V | G | | V | M | S | | |
| | | Q | | | | | | | | | S | | | Q | | | |
| | | S | | | | | | | | | | | | V | | | |

Bold = highly sensitive response but slightly leaky;
Bold and italic = highly selected residues;
*= only residue that functions at the respective position

[0328] Library CsL3 construction and screening: Based on the IVM results the top performing residue substitutions were incorporated into library CsL3 (Table 14). The library was assembled with the oligonucleotides shown below in Table 19. The first and last primers in each set were used as rescue primers. To enable purification of hit proteins, a 6×His-tag between was added to the C-terminus of the ligand binding domain of each clone during the assembly and rescue process. The library was then inserted into pVER7334 Sac1/Asc1, transformed into E. coli assay strain Km3 and selected on LB+40 ug/ml Kanamycin and 50 ug/ml Carbenicillin. Approximately 10,000 colonies were then re-arrayed into 384-well format, and replica plated onto M9 Xgal assay medium containing 0 or 20 ppb Cs. Colony color was then assessed at 24 and 96 hrs of incubation at 37° C. Results showed that residue substitutions N82F, V134T, and F147Q were highly preferred as was the maintenance of residues Q64, A113, M116, 5135, R138, and V139. Interestingly the very best hits had a random F147L substitution resulting in an additional ˜2× increase in activity over the next best clones. Also, while the C86M substitution was less frequent in the overall hit population it occurred in all top 26 clones.

TABLE 19
Oligonucleotides encoding library CsL3.

| | SEQ ID | | |
|---|---|---|---|
| Oligo | NO | Sequence | Group |
| CsL3:1 | 1844 | TGGCACGTCAAGAACAAGCGAGCTCTGCTAGACGCCTTGGCC | 1 |
| CsL3:2 | 1845 | ATTGAGATGMATGATAGGCACRGCACCCACTACTTGCCTTTG | 2 |
| CsL3:3 | 1846 | ATTGAGATGMATGATAGGCACCAGACCCACTACTTGCCTTTG | |
| CsL3:4 | 1847 | ATTGAGATGATGGATAGGCACRGCACCCACTACTTGCCTTTG | |
| CsL3:5 | 1848 | ATTGAGATGATGGATAGGCACCAGACCCACTACTTGCCTTTG | |
| CsL3:6 | 1849 | GAAGGGGAAAGCTGGCAAGACTTCTTGAGGAACTWCGCTAAG | 3 |
| CsL3:7 | 1850 | AGCTCCCGACGTGCTTTGCTCAGTCACCGTGATGGAGCCAAG | 4 |
| CsL3:8 | 1851 | AGCATGCGACGTGCTTTGCTCAGTCACCGTGATGGAGCCAAG | |
| CsL3:9 | 1852 | GTCKCGCTTGGTACACGGTGGACGGAGCAACAGTATGAAACT | 5 |
| CsL3:10 | 1853 | GSAGAGAACWTGTTGGCCTTCCTGACCCAACAAGGTTTCTCC | 6 |
| CsL3:11 | 1854 | CTTGAGAATGCCTTGTACGCAACCGRCGCTGTGCRTRTTTTC | 7 |
| CsL3:12 | 1855 | CTTGAGAATGCCTTGTACGCAACCTCAGCTGTGCRTRTTTTC | |
| CsL3:13 | 1856 | CTTGAGAATGCCTTGTACGCASTGGRCGCTGTGCRTRTTTTC | |
| CsL3:14 | 1857 | CTTGAGAATGCCTTGTACGCASTGTCAGCTGTGCRTRTTTTC | |
| CsL3:15 | 1858 | ACTCTGGGTGCCGTATTGGTGGATCAAGAGRGCCAAGTCGCT | 8 |
| CsL3:16 | 1859 | ACTCTGGGTGCCGTATTGGTGGATCAAGAGCAGCAAGTCGCT | |
| CsL3:17 | 1860 | ACTCTGGGTGCCGTATTGCAAGATCAAGAGRGCCAAGTCGCT | |
| CsL3:18 | 1861 | ACTCTGGGTGCCGTATTGCAAGATCAAGAGCAGCAAGTCGCT | |
| CsL3:19 | 1862 | AAGGAGGAGAGGGAAACACCTACTACTGATAGTATGCCGCCA | 9 |
| CsL3:20 | 1863 | CTGCTTCGACAAGCCTGGGAACTCAAAGATCACCAAGGTGCA | 10 |
| CsL3:21 | 1864 | GAGCCAGCCTTCCTGTTCGGCCTTGAATTGATCATAGCCGGA | 11 |
| CsL3:22 | 1865 | TTGGAGAAGCAGCTGAAGAGAGAAAGTGGGTCTCACCATCAC | 12 |
| CsL3:23 | 1866 | GTGCCTATCATKCATCTCAATGGCCAAGGCGTCTAGCAGAGC | 13 |
| CsL3:24 | 1867 | GTGCCTATCCATCATCTCAATGGCCAAGGCGTCTAGCAGAGC | |
| CsL3:25 | 1868 | GTCTTGCCAGCTTTCCCCTTCCAAAGGCAAGTAGTGGGTGCT | 14 |
| CsL3:26 | 1869 | GTCTTGCCAGCTTTCCCCTTCCAAAGGCAAGTAGTGGGTGCC | |
| CsL3:27 | 1870 | GTCTTGCCAGCTTTCCCCTTCCAAAGGCAAGTAGTGGGTCTG | |
| CsL3:28 | 1871 | GAGCAAAGCACGTCGGGAGCTCTTAGCGWAGTTCCTCAAGAA | 15 |
| CsL3:29 | 1872 | GAGCAAAGCACGTCGCATGCTCTTAGCGWAGTTCCTCAAGAA | |
| CsL3:30 | 1873 | CCACCGTGTACCAAGCGMGACCTTGGCTCCATCACGGTGACT | 16 |
| CsL3:31 | 1874 | GAAGGCCAACAWGTTCTCTSCAGTTTCATACTGTTGCTCCGT | 17 |
| CsL3:32 | 1875 | TGCGTACAAGGCATTCTCAAGGGAGAAACCTTGTTGGGTCAG | 18 |
| CsL3:33 | 1876 | CACCAATACGGCACCCAGAGTGAAAAYAYGCACAGCGYCGGT | 19 |
| CsL3:34 | 1877 | TTGCAATACGGCACCCAGAGTGAAAAYAYGCACAGCGYCGGT | |
| CsL3:35 | 1878 | CACCAATACGGCACCCAGAGTGAAAAYAYGCACAGCTGAGGT | |
| CsL3:36 | 1879 | TTGCAATACGGCACCCAGAGTGAAAAYAYGCACAGCTGAGGT | |
| CsL3:37 | 1880 | CACCAATACGGCACCCAGAGTGAAAAYAYGCACAGCGYCCAC | |
| CsL3:38 | 1881 | CACCAATACGGCACCCAGAGTGAAAAYAYGCACAGCGYCCAG | |
| CsL3:39 | 1882 | TTGCAATACGGCACCCAGAGTGAAAAYAYGCACAGCGYCCAC | |
| CsL3:40 | 1883 | TTGCAATACGGCACCCAGAGTGAAAAYAYGCACAGCGYCCAG | |
| CsL3:41 | 1884 | CACCAATACGGCACCCAGAGTGAAAAYAYGCACAGCTGACAC | |
| CsL3:42 | 1885 | CACCAATACGGCACCCAGAGTGAAAAYAYGCACAGCTGACAG | |
| CsL3:43 | 1886 | TTGCAATACGGCACCCAGAGTGAAAAYAYGCACAGCTGACAC | |
| CsL3:44 | 1887 | TTGCAATACGGCACCCAGAGTGAAAAYAYGCACAGCTGACAG | |
| CsL3:45 | 1888 | AGGTGTTTCCCTCTCCTCCTTAGCGACTTGGCYCTCTTGATC | 20 |
| CsL3:46 | 1889 | AGGTGTTTCCCTCTCCTCCTTAGCGACTTGCTGCTCTTGATC | |
| CsL3:47 | 1890 | TTCCCAGGCTTGTCGAAGCAGTGGCGGCATACTATCAGTAGT | 21 |
| CsL3:48 | 1891 | GCCGAACAGGAAGGCTGGCTCTGCACCTTGGTGATCTTTGAG | 22 |
| CsL3:49 | 1892 | TCTCTTCAGCTGCTTCTCCAATCCGGCTATGATCAATTCAAG | 23 |
| CsL3:50 | 1893 | CACAGGCGCGCCTTAGTGATGGTGGTGATGGTGAGACCCACTTTC | 24 |

TABLE 20
Performance of the top 20 CsL3 hits and associated residue substitutions
relative to the parent clone L8-F301.

| | Colony Assay | | | Residue and | | | | | | | | | |
|---|---|---|---|---|---|---|---|---|---|---|---|---|---|
| | Results | | | Sequence Position | | | | | | | | | |
| CsL3 Hit | REP | IND | F. IND | 60 | 64 | 82 | 86 | 100 | 113 | 121 | 126 | 128 | 134 |
| L8-F301 | 0.7 | 1.6 | 2.5 | M | Q | N | C | C | A | T | S | E | V |
| 1C12 | 0.9 | 8.8 | 9.5 | H | G | F | M | S | — | — | — | — | T |
| 1B11 | 1.3 | 10.8 | 8.0 | — | — | F | M | A | — | — | — | — | T |
| 1A07 | 1.5 | 8.1 | 5.4 | — | — | F | M | S | — | — | P | — | T |
| 1B04 | 2.2 | 10.5 | 4.8 | H | — | F | M | S | — | — | — | — | T |
| 2E09 | 1.3 | 5.7 | 4.5 | H | — | F | M | A | G | — | — | — | T |
| 2D11 | 0.9 | 3.9 | 4.3 | N | — | F | M | S | — | — | — | — | T |
| 2B09 | 0.9 | 3.8 | 4.3 | — | — | Y | M | S | — | — | — | — | T |
| 2B06 | 1.3 | 5.6 | 4.2 | H | — | F | M | S | G | — | — | — | — |
| 2A01 | 1.4 | 5.9 | 4.2 | — | G | F | M | S | — | — | — | — | T |
| 2D10 | 1.1 | 4.7 | 4.2 | H | — | F | M | S | — | — | — | — | T |
| 2D02 | 1.6 | 6.3 | 3.9 | — | — | F | M | S | — | — | P | — | T |
| 2E07 | 0.9 | 3.4 | 3.8 | — | — | Y | M | A | — | — | — | — | T |
| 2E12 | 1.2 | 4.4 | 3.8 | — | — | Y | M | A | — | — | — | — | T |
| 1C01 | 1.5 | 5.5 | 3.7 | — | G | Y | M | A | — | — | — | — | T |
| 1B05 | 1.3 | 4.8 | 3.6 | — | — | Y | M | A | — | — | — | — | T |
| 2E10 | 0.4 | 1.3 | 3.5 | H | R | Y | M | S | — | — | — | — | T |
| 2B12 | 1.7 | 6.1 | 3.5 | — | — | F | M | S | — | — | — | — | T |
| 2E08 | 2.2 | 7.6 | 3.4 | — | — | F | M | A | — | — | — | — | T |
| 2E11 | 2.1 | 7.2 | 3.4 | — | — | F | M | S | — | I | — | Q | L |
| 2D12 | 2.1 | 7.0 | 3.4 | — | S | F | M | A | G | — | — | — | T |

| | Residue and | | | | | | | | | | | |
|---|---|---|---|---|---|---|---|---|---|---|---|---|
| | Sequence Position | | | | | | | | | | | |
| CsL3 Hit | 135 | 139 | 147 | 151 | 152 | 155 | 156 | 157 | 158 | 163 | 192 | 202 |
| L8-F301 | S | V | F | S | Q | K | E | E | R | T | L | K |
| 1C12 | — | — | L | Q | — | — | — | — | — | — | — | * |
| 1B11 | — | — | L | Q | — | — | — | — | — | — | — | — |
| 1A07 | D | — | Q | G | — | — | — | — | — | — | — | — |
| 1B04 | — | — | Q | Q | — | — | — | — | — | P | — | — |
| 2E09 | — | — | Q | G | — | — | — | — | — | — | — | — |
| 2D11 | — | — | Q | — | — | — | — | — | — | — | — | — |
| 2B09 | — | — | Q | G | — | N | — | — | — | — | — | — |
| 2B06 | D | — | Q | G | — | — | — | D | — | — | — | — |
| 2A01 | — | — | Q | — | — | — | — | — | — | — | — | — |
| 2D10 | — | — | Q | — | — | — | — | — | — | — | — | — |
| 2D02 | D | — | Q | G | — | — | — | — | — | — | — | — |
| 2E07 | — | — | Q | G | — | — | — | — | — | — | — | — |
| 2E12 | G | — | Q | — | H | — | V | — | — | — | — | — |
| 1C01 | G | I | Q | — | — | — | — | — | — | — | V | — |
| 1B05 | — | — | Q | G | — | — | — | — | — | — | — | — |
| 2E10 | — | — | V | Q | — | — | — | — | T | — | — | — |
| 2B12 | — | — | Q | — | — | — | — | — | — | — | — | N |
| 2E08 | — | — | Q | G | — | — | — | — | — | — | — | — |
| 2E11 | — | — | Q | — | — | — | — | — | — | — | — | — |
| 2D12 | — | — | Q | — | — | — | — | — | — | — | — | — |

IND = induction with 20 ppb CS;
REP = repression in absence of inducer;
F. IND = fold induction (IND/REP)

### D. Sixth Round Chlorsulfuron Repressor Shuffling.

[0329] Creating Novel Diversity Through Random Mutagenesis.

[0330] In order to create new diversity for shuffling the top clone from CsL3 was subjected to error prone PCR mutagenesis using Mutazyme (Stratagene). The mutated PCR product encoding the CsR ligand binding domain was inserted into library expression vector pVER7334 as a Sac1 to Asc1 fragment, transformed into library strain Km3 and plated onto LB+40 ug/ml Kanamycin and 50 ug/ml Carbenecillin. Approximately 10,000 colonies were then replica plated onto M9 Xgal assay medium +/−20 ppb Cs. Putative hits were then re-arrayed and replica plated onto the same assay medium. Performance was gauged by the level of blue colony color after 24 hrs incubation on inducer (induction) and 72 hrs incubation without inducer (repression). The top hits were then subjected to liquid B-galactosidase assays for quantitative assessment (Table 21). The results reveal that modification of position D178 is important as mutation to either V or E improves activity at least two-fold. Substitutions F78Y, R88C, and S165R may also have made contributions to activity.

TABLE 21
Performance of the top CsL3-MTZ hits and associated residue
substitutions relative to the parent clone CsL3-C12 and L8-F301.

| | B-galacto- | | | Residue and | | | | | | | | | | | | |
|---|---|---|---|---|---|---|---|---|---|---|---|---|---|---|---|---|
| | sidase assay | | | Sequence Position | | | | | | | | | | | | |
| Clone | IND | REP | F. IND | 60 | 64 | 78 | 82 | 86 | 88 | 100 | 134 | 147 | 151 | 165 | 178 | 202 |
| L8-3F01 | 8 | 7 | 1 | M | Q | F | N | C | R | C | V | F | S | S | D | K |
| CsL3-C12 | 218 | 17 | 13 | H | G | — | F | M | — | S | T | L | Q | — | — | * |
| CsL3-C12-MTZ-2 | 287 | 9 | 30 | H | G | — | F | M | — | S | T | L | Q | — | V | * |
| CsL3-C12-MTZ-4 | 460 | 18 | 25 | H | G | Y | F | M | — | S | T | L | Q | — | E | * |
| CsL3-C12-MTZ-3 | 347 | 21 | 16 | H | G | — | F | M | C | S | T | L | Q | R | — | * |
| CsL3-C12-MTZ-5 | 440 | 29 | 15 | H | G | — | F | M | — | S | T | L | Q | — | E | * |

IND = induction with 20 ppb CS;
REP = repression in absence of inducer;
F. IND = fold induction (IND/REP)

[0331] Construction and Screening of Library CsL4.2.

[0332] Seventh round library CsL4.2 was designed based on the best diversity from CsL3 and CsL3-MTZ library screens (Table 14). The library was assembled with oligonucleotides shown below in Table 22. The first and last primers were used as rescue primers. CsL4.2 included a C-terminal 6×His-tag extension to facilitate protein purification. The library was assembled and cloned into vector pVER7334 Sac1 to Asc1, transformed into library assay strain Km3 and plated onto LB+40 ug/m1 Kanamycin and 50 ug/ml carbenecillin. Approximately 8,000 colonies were re-arrayed into 384-well format and replica plated onto M9 Xgal assay medium +/−2 ppb Cs. Putative hits were re-arrayed in 96-well format onto the same media for re-testing. Confirmed hits were then tested for induction and repression aspects in liquid culture using B-galactosidase assays. Results show that F82, L147, V178, and to a lesser extent Q151 were strongly selected for in the hit population. Although there was no preference at position 135 in the larger hit population, the top six clones all had the S135D substitution (Table 23).

TABLE 22
Library 4.2 assembly oligonucleotides.

| | SEQ | | |
|---|---|---|---|
| Oligo | ID NO | Sequence | Group |
| CsL4.2-1 | 1894 | TGGCACGTCAAGAACAAGCGAGCTCTGCTAGACGCCTTGGCC | 1 |
| CsL4.2-2 | 1895 | ATTGAGATGCATGATAGGCACGGAACCCACTACTTGCCTTTG | 2 |
| CsL4.2-3 | 1896 | ATTGAGATGCATGATAGGCACCAAACCCACTACTTGCCTTTG | |
| CsL4.2-4 | 1897 | ATTGAGATGATGGATAGGCACGGAACCCACTACTTGCCTTTG | |
| CsL4.2-5 | 1898 | ATTGAGATGATGGATAGGCACCAAACCCACTACTTGCCTTTG | |
| CsL4.2-6 | 1899 | GAAGGGGAAAGCTGGCAAGACTWTTTGAGGAACTWTGCTAAG | 3 |
| CsL4.2-7 | 1900 | AGCATGCGACKAGCTTTGCTCAGTCACCGTGATGGAGCCAAG | 4 |
| CsL4.2-8 | 1901 | AGCATGCGATGCGCTTTGCTCAGTCACCGTGATGGAGCCAAG | |
| CsL4.2-9 | 1902 | GTCKCCCTTGGTACACGGTGGACGGAGCAACAGTATGAAACT | 5 |
| CsL4.2-10 | 1903 | GCGGAGAACATGTTGGCCTTCCTGACCCAACAAGGTTTCTCC | 6 |
| CsL4.2-11 | 1904 | CTTGAGAATGCCTTGTACGCAACAGATGCTGTGCGGGTTTTC | 7 |
| CsL4.2-12 | 1905 | CTTGAGAATGCCTTGTACGCAACAAGCGCTGTGCGGGTTTTC | |
| CsL4.2-13 | 1906 | ACTCTGGGTGCCGTATTGCWGGATCAAGAGGGACAAGTCGCT | 8 |
| CsL4.2-14 | 1907 | ACTCTGGGTGCCGTATTGCWGGATCAAGAGCAACAAGTCGCT | |
| CsL4.2-15 | 1908 | AAKGAGGAGAGGGAAACACCTACTMCTGATAGWATGCCGCCA | 9 |
| CsL4.2-16 | 1909 | CTGCTTCGACAAGCCTGGGAACTCAAAGWKCACCAAGGTGCA | 10 |
| CsL4.2-17 | 1910 | GAGCCAGCCTTCCTGTTCGGCCTTGAATTGATCATAGCCGGA | 11 |
| CsL4.2-18 | 1911 | TTGGAGAAGCAGCTGAAGAGAGAAAGTGGGTCTCACCATCAC | 12 |
| CsL4.2-19 | 1912 | GTGCCTATCATGCATCTCAATGGCCAAGGCGTCTAGCAGAGC | 13 |
| CsL4.2-20 | 1913 | GTGCCTATCCATCATCTCAATGGCCAAGGCGTCTAGCAGAGC | |
| CsL4.2-21 | 1914 | GTCTTGCCAGCTTTCCCCTTCCAAAGGCAAGTAGTGGGTTCC | 14 |
| CsL4.2-22 | 1915 | GTCTTGCCAGCTTTCCCCTTCCAAAGGCAAGTAGTGGGTTTG | |
| CsL4.2-23 | 1916 | GAGCAAAGCTMGTCGCATGCTCTTAGCAWAGTTCCTCAAAWA | 15 |
| CsL4.2-24 | 1917 | GAGCAAAGCGCATCGCATGCTCTTAGCAWAGTTCCTCAAAWA | |
| CsL4.2-25 | 1918 | CCACCGTGTACCAAGGGMGACCTTGGCTCCATCACGGTGACT | 16 |
| CsL4.2-26 | 1919 | GAAGGCCAACATGTTCTCCGCAGTTTCATACTGTTGCTCCGT | 17 |
| CsL4.2-27 | 1920 | TGCGTACAAGGCATTCTCAAGGGAGAAACCTTGTTGGGTCAG | 18 |
| CsL4.2-28 | 1921 | CWGCAATACGGCACCCAGAGTGAAAACCCGCACAGCATCTGT | 19 |
| CsL4.2-29 | 1922 | CWGCAATACGGCACCCAGAGTGAAAACCCGCACAGCGCTTGT | |
| CsL4.2-30 | 1923 | AGGTGTTTCCCTCTCCTCMTTAGCGACTTGTCCCTCTTGATC | 20 |
| CsL4.2-31 | 1924 | AGGTGTTTCCCTCTCCTCMTTAGCGACTTGTTGCTCTTGATC | |
| CsL4.2-32 | 1925 | TTCCCAGGCTTGTCGAAGCAGTGGCGGCATWCTATCAGKAGT | 21 |
| CsL4.2-33 | 1926 | GCCGAACAGGAAGGCTGGCTCTGCACCTTGGTGMWCTTTGAG | 22 |
| CsL4.2-34 | 1927 | TCTCTTCAGCTGCTTCTCCAATCCGGCTATGATCAATTCAAG | 23 |
| CsL4.2-35 | 1928 | CACAGGCGCGCCTTAGTGATGGTGGTGATGGTGAGACCCACTTTC | 24 |

TABLE 23
Performance of the top 20 CsL4.2 hits and associated residue substitutions relative to
the parent clone L8-F301.

| | B-galactosidase | | | Residue and Sequence Position | | | | | | | | | | | |
|---|---|---|---|---|---|---|---|---|---|---|---|---|---|---|---|
| Clone | REP | IND | F. IND | 60 | 64 | 78 | 82 | 86 | 88 | 99 | 100 | 119 | 123 | 134 | 135 |
| L8-3F01 | 0.4 | 0.9 | 2.0 | M | Q | F | N | C | R | V | C | F | Q | V | S |
| CsL4.2-20 | 0.2 | 7.4 | 39.8 | H | — | — | F | M | L | — | S | — | — | T | D |
| CsL4.2-15 | 0.2 | 4.0 | 25.5 | H | — | — | F | M | — | — | S | — | — | T | D |
| CsL4.2-22 | 0.3 | 5.4 | 20.8 | H | — | — | F | M | — | I | A | — | — | T | D |
| CsL4.2-07 | 0.3 | 6.5 | 18.9 | H | — | Y | F | M | C | I | A | — | — | T | D |
| CsL4.2-16 | 0.3 | 3.8 | 15.2 | — | — | Y | F | M | C | — | S | — | — | T | D |
| CsL4.2-08 | 0.7 | 10.7 | 15.0 | — | — | — | F | M | — | — | A | — | H | T | D |
| CsL4.2-24 | 0.4 | 5.4 | 14.3 | H | — | Y | F | M | C | — | A | — | — | T | — |
| CsL4.2-21 | 0.2 | 3.2 | 13.2 | — | G | — | Y | M | — | — | A | C | — | T | — |
| CsL4.2-28 | 0.5 | 5.3 | 11.3 | — | — | Y | F | M | C | — | A | — | — | T | — |
| CsL4.2-30 | 0.5 | 4.9 | 10.8 | H | — | — | F | M | — | — | A | — | — | T | — |
| CsL4.2-26 | 0.3 | 3.1 | 10.6 | H | — | Y | F | M | C | — | S | — | — | T | — |
| CsL4.2-23 | 1.0 | 10.4 | 10.5 | — | — | Y | F | M | C | — | A | — | — | T | — |
| CsL4.2-04 | 0.4 | 4.3 | 10.2 | H | — | — | F | M | C | — | A | — | — | T | D |
| CsL4.2-01 | 0.4 | 3.8 | 9.8 | H | — | Y | F | M | — | — | A | — | — | T | D |
| CsL4.2-17 | 0.3 | 3.1 | 9.7 | — | — | Y | F | M | C | — | A | — | — | T | — |
| CsL4.2-12 | 0.7 | 6.4 | 9.5 | H | G | — | F | M | — | — | A | — | — | T | — |
| CsL4.2-18 | 0.7 | 6.8 | 9.3 | — | — | — | F | M | C | — | A | — | — | T | — |
| CsL4.2-27 | 0.4 | 3.2 | 9.1 | — | — | — | F | M | C | — | S | — | — | T | D |
| CsL4.2-11 | 0.5 | 4.8 | 8.9 | H | G | Y | F | M | — | — | S | — | — | T | — |

| | Residue and Sequence Position | | | | | | | | | | | |
|---|---|---|---|---|---|---|---|---|---|---|---|---|
| Clone | 147 | 151 | 155 | 156 | 157 | 163 | 165 | 171 | 178 | 193 | 202 | 204 |
| L8-3F01 | F | S | K | E | E | T | S | R | D | I | K | E |
| CsL4.2-20 | L | Q | — | — | — | P | — | — | V | — | — | — |
| CsL4.2-15 | L | Q | — | — | — | — | — | — | V | — | — | — |
| CsL4.2-22 | L | Q | — | — | — | P | — | — | — | — | — | — |
| CsL4.2-07 | L | Q | — | — | — | P | — | — | V | — | — | — |
| CsL4.2-16 | L | G | N | — | — | P | R | — | V | — | — | — |
| CsL4.2-08 | L | Q | — | — | — | P | — | — | V | — | — | — |
| CsL4.2-24 | L | G | N | — | — | P | — | — | V | — | — | — |
| CsL4.2-21 | L | Q | N | — | — | — | — | — | V | — | — | — |
| CsL4.2-28 | L | Q | — | Q | — | P | — | — | V | — | — | — |
| CsL4.2-30 | L | G | N | — | — | P | — | — | V | — | — | — |
| CsL4.2-26 | L | Q | — | — | — | P | R | — | V | — | — | — |
| CsL4.2-23 | L | Q | — | — | — | P | R | — | V | — | — | — |
| CsL4.2-04 | L | Q | N | — | G | — | — | — | E | — | — | — |
| CsL4.2-01 | L | G | — | — | — | — | — | — | V | — | — | — |
| CsL4.2-17 | L | Q | — | — | — | — | — | — | V | — | — | — |
| CsL4.2-12 | L | G | N | — | — | — | — | — | V | — | — | — |
| CsL4.2-18 | L | Q | — | — | — | P | R | — | V | L | — | — |
| CsL4.2-27 | L | Q | — | — | — | P | R | Q | E | — | — | D |
| CsL4.2-11 | L | Q | — | — | — | — | — | — | E | — | X | — |

IND = induction with 20 ppb CS;
REP = repression in absence of inducer;
F. IND = fold induction (IND/REP)

### E. In Vitro Mutagenesis of Residue D178.

[0333] Since residue position D178 [relative to TetR(B)] was found by random mutagenesis to be important for activity further mining was sought. To this end, saturation mutagenesis was performed at this position on top CsR hits CsL4.2-15 and CsL4.2-20 using the following top and bottom strand primers in a Phusion DNA polymerase PCR reaction (New England Biolabs): GCCTGGGAACTCAAANNKCACCAAGGTGCAGAGC and GCTCTGCACCTTGGTGMNNTTTGAGTTCCCAGGC. Mutagenesis reactions were transformed into E. coli assay strain Km3 and plated onto LB+50 ug/ml Carbenecillin. Colonies were then re-arrayed into 384 well format and replica plated onto M9 Xgal assay medium +/−5 ppb Chlorsulfuron. Putative hits were then re-arrayed and analyzed by B-galactosidase assays relative to the parent clones (FIG. 10). The results show that V178 substitutions in CsL4.2-20 to C, N, Q, S, or T all yield improved activity. However, the most active substitution, V178Q, led to an approximately 2× improvement in both CsL4.2-15 and CsL4.2-20 backbones.

### F. Enhancement of Ligand Selectivity Thru Structure Guided Mutagenesis.

[0334] Chlorsulfuron (Cs) repressor CsL4.2-20 is approximately 2- and 30-fold more sensitive to Cs than Metsulfuron (Ms) and Ethametsulfuron (Es), respectively (Table 26). In order to develop non-overlapping SU herbicide responsive repressors it is desired to further separate their ligand spectrum. From the CsL4.2-20 structural model we determined that residues A56, T103, Y110, L117, L131, T134, R138, P161, M166, and A173 could potentially influence docking of related sulfonylurea compounds (e.g. note L131 and T134 in FIG. 14). Cs and Es differ in decoration of both the phenyl and triazine ring structures (circled in FIG. 14). Cs has a chloride (C1) group in the ortho position on the phenyl ring whereas it is a carboxymethyl group in Es. In addition, the meta-positions of the triazine moiety on both molecules have different substitutions: methyl and methyl-ether on Cs vs secondary amine and ethyl-ether groups on Es. Metsulfuron is essentially a hybrid between these two herbicides in that it has the triazine moiety from Cs and the phenyl moiety from Es. Saturation mutagenesis primers for each residue target are shown below. Mutagenesis reactions were carried out using Phusion DNA polymerase (New England Biolabs) and the primers listed in Table 24 and Table 25. Reactions were transformed into E. coli assay strain Km3 and plated onto LB+50 ug/ml Carbenecillin. Colonies were re-arrayed into 384-well format and replica plated onto M9 X-gal assay medium with no inducer, 10 ppb Es, 200 ppb Es, and 25 ppb Ms. Mutants having shifted selectivity relative to parent Cs activity were re-arrayed into 96-well format for further study. Putative hits were tested for repression and induction with 1, 2.5, 5, and 10 ppb Cs; 25, 50, 100, and 200 ppb Ms; and 200, 250, 300, 350, 400, 450 and 500 ppb Es. The dose of each ligand required to elicit an equal response was then used to determine relative selectivity for each clone. The ratio of Cs to Es and Cs to Ms activities as well as the relative Cs activity for the top hits is presented in Table 25. These data show that positions L131 and T134 were especially useful in modifying ligand selectivity. Mutations L131K and T134W effectively blocked Es activation: 500 ppb Es gave a similar response to 1 ppb Cs. The latter substitution unfortunately reduces Cs activity by ˜2-fold. Other residue substitutions at these positions also impact selectivity to a lesser degree. Interestingly, some mutations increased the response to Cs such as L131C while reducing, but not eliminating, Es activity. Changes in selectivity towards Ms, while occurring in most of the L131 and T134 mutants, were more modest as Cs and Ms are more similar than Cs and Es in structure.

TABLE 24
Oligonucleotides used for saturation
mutagenesis of residues potentially
involved in selectivity of different
sulfonylurea herbicides.

| Oligo | Sequence | SEQ ID NO |
|---|---|---|
| A56NNKT | GCTCTGCTAGACGCCTTGNNKATTGAGATGCA | 1929 |
| | TGATAGGC | |
| A56NNKB | GCCTATCATGCATCTCAATMNNCAAGGCGTCT | 1930 |
| | AGCAGAGC | |
| T103NNKT | GCCAAGGTCTCCCTTGGTNNKCGGTGGACGGA | 1931 |
| | GCAAC | |
| T103NNKB | GTTGCTCCGTCCACCGMNNACCAAGGGAGACC | 1932 |
| | TTGGC | |
| Y110NNKT | GGTGGACGGAGCAACAGNNKGAAACTGCGGAG | 1933 |
| | AAC | |
| Y110NNKB | GTTCTCCGCAGTTTCMNNCTGTTGCTCCGTCC | 1934 |
| | ACC | |
| L117NNKT | GAAACTGCGGAGAACATGNNKGCCTTCCTGAC | 1935 |
| | CCAAC | |
| L117NNKB | GTTGGGTCAGGAAGGCMNNCATGTTCTCCGCA | 1936 |
| | GTTTC | |
| L131NNKT | GGTTTCTCCCTTGAGAATGCCNNKTACGCAAC | 1937 |
| | AGATGC | |

TABLE 25
Oligonucleotides used for saturation
mutagenesis of residues potentially
involved in selectivity of different
sulfonylurea herbicides.

| Oligo | Sequence | SEQ ID NO |
|---|---|---|
| L131NNKB | GCATCTGTTGCGTAMNNGGCATTCTCAAGGGA | 1938 |
| | GAAACC | |
| T134NNKT | GAATGCCTTGTACGCANNKGATGCTGTGCGGG | 1939 |
| | TTTTC | |
| T134NNKB | GAAAACCCGCACAGCATCMNNTGCGTACAAGG | 1940 |
| | CATTC | |
| R138NNKT | GCAACAGATGCTGTGNNKGTTTTCACTCTGGG | 1941 |
| | TGC | |
| R138NNKB | GCACCCAGAGTGAAAACMNNCACAGCATCTGT | 1942 |
| | TGC | |
| P161NNKT | GAGGAGAGGGAAACANNKACTCCTGATAGTAT | 1943 |
| | GC | |
| P161NNKB | GCATACTATCAGGAGTMNNTGTTTCCCTCTCC | 1944 |
| | TC | |
| M166NNKT | GAAACACCTACTCCTGATAGTNNKCCGCCACT | 1945 |
| | GCTTC | |
| M166NNKB | GAAGCAGTGGCGGMNNACTATCAGGAGTAGGT | 1946 |
| | GTTTC | |
| A173NNKT | GCCACTGCTTCGACAANNKTGGGAACTCAAAG | 1947 |
| | TTC | |
| A173NNKB | GAACTTTGAGTTCCCAMNNTTGTCGAAGCAGT | 1948 |
| | GGC | |

TABLE 26
Relative Cs, Es, and Ms selectivity of various
hits based on B-galactosidase assays.

| Residue | Relative B-galactosidase activity | | |
|---|---|---|---|
| Substitution | Cs | Cs/Es | Cs/Ms |
| None | 1.0 | 30 | 2.0 |
| L131K | 1.0 | 200 | 20.0 |
| L131H | 1.0 | 80 | 3.3 |
| L131A | 0.5 | 60 | 1.7 |
| L131C | 2.0 | 60 | 4.0 |
| T134S | 0.5 | 40 | 2.5 |
| T134W | 0.5 | 100 | 1.6 |

Relative B-galactosidase activity was determined at various doses of Cs, Es, and Ms. The amount of each inducer required to achieve the same level of activity was used to determine relative ligand selectivity.

[0335] The article “a” and “an” are used herein to refer to one or more than one (i.e., to at least one) of the grammatical object of the article. By way of example, “an element” means one or more element.

[0336] All publications and patent applications mentioned in the specification are indicative of the level of those skilled in the art to which this invention pertains. All publications and patent applications are herein incorporated by reference to the same extent as if each individual publication or patent application was specifically and individually indicated to be incorporated by reference.

[0337] Although the foregoing invention has been described in some detail by way of illustration and example for purposes of clarity of understanding, it will be obvious that certain changes and modifications may be practiced within the scope of the appended claims.

The application's sequence listing, which the Patent Office published only in electronic form, follows.

SEQUENCE LISTING (2118 sequences)

SEQ ID NO: 1 - protein, 207 aa, Escherichia coli
MSRLDKSKVINSALELLNEVGIEGLTTRKLAQKLGVEQPTLYWHVKNKRALLDALAIEMLDRHHTHFCPLEGESWQDFLRNNAKSFRCALLSHRDGAKVHLGTRPTEKQYETLENQLAFLCQQGFSLENALYALSAVGHFTLGCVLEDQEHQVAKEERETPTTDSMPPLLRQAIELFDHQGAEPAFLFGLELIICGLEKQLKCESGS

SEQ ID NO: 2 - protein, 208 aa, Artificial Sequence
  WT TetR with Gly insertion at position 2
MGSRLDKSKVINSALELLNEVGIEGLTTRKLAQKLGVEQPTLYWHVKNKRALLDALAIEMLDRHHTHFCPLEGESWQDFLRNNAKSFRCALLSHRDGAKVHLGTRPTEKQYETLENQLAFLCQQGFSLENALYALSAVGHFTLGCVLEDQEHQVAKEERETPTTDSMPPLLRQAIELFDHQGAEPAFLFGLELIICGLEKQLKCESGS

SEQ ID NO: 3 - protein, 208 aa, Artificial Sequence
  Sulfonylurea responsive repressor
MGSRLDKSKVINSALELLNEVGIEGLTTRKLAQKLGVEQPTLYWHVKNKRALLDALAIEMLDRHATHFCPLEGESWQDFLRNNAKSFRCALLSHRDGAKVCLGTAVTEKQYETMENILAFLCQQGFSLENALYARRAVIAFTLGCVLWDQEYQVAKEERETPTTDSMPPLLRQARELIDHQGAEPAFLFGLELIICGLEKQLKCESGS

SEQ ID NO: 4 - protein, 208 aa, Artificial Sequence
  Sulfonylurea responsive repressor
MGSRLDKSKVINSALELLNEVGIEGLTTRKLAQKLGVEQPTLYWHVKNKRALLDALAIEMLDRHNTHFCPLEGESWQDFLRNNAKSWRCALLSHRDGAKVVLGTAITEKQYETHENPLAFLCQQGFSLENALYAIAAVRRFTLGCVLVDQERQVAKEERETPTTDSMPPLLRQASELQDHQGAEPAFLFGLELIICGLEKQLKCERGS

SEQ ID NO: 5 - protein, 208 aa, Artificial Sequence
  Sulfonylurea responsive repressor
MGSRLDKSKVINSALELLNEVGIEGLTTRKLAQKLGVEQPTLYWHVKNKRALLDALAIEMLDRHATHFCPLEGESWQDFLRNNAKSMRCALLSHRDGAKVCLGTGFTEKQYETAENSLAFLCQQGFSLENALYAMQAVCIFTLGCVLLDQELQVAKEERETPTTDSMPPLLRQALELKDHQGAEPAFLFGLELIICGLEKQLKCESGS

SEQ ID NO: 6 - protein, 208 aa, Artificial Sequence
  Sulfonylurea responsive repressor
MGSRLDKSKVINSALELLNEVGIEGLTTRKLAQKLGVEQPTLYWHVKNKRALLDALAIEMMDRHQTHFCPLEGESWQDFLRNNAKSMRCALLSHRDGAKVFLGTAWTEKQYETVENLLAFLCQQGFSLENALYALNAVATFTLGCVLWDQEKQVAKEERETPTTDSMPPLLRQAHELGDHQGAEPAFLFGLELIICGLEKQLKSESGS

SEQ ID NO: 7 - protein, 208 aa, Artificial Sequence
  Sulfonylurea responsive repressor
MGSRLDKSKVINSALELLNEVGIEGLTTRKLAQKLGVEQPTLYWHVKNKRALLDALAIEMMDRHHTHFCPLEGESWQDFLRNTAKSYRCALLSHRDGAKVCLGTAITEKQYETKENNLAFLCQQGFSLENALYARQAVRVFTLGCVLFDQEMQVAKEERETPTTDSMPPLLRQASELLDHQGAEPAFLFGLELIICGLEKQLKSESGS

SEQ ID NO: 8 - protein, 208 aa, Artificial Sequence
  Sulfonylurea responsive repressor
MGSRLDKSKVINSALELLNEVGIEGLTTRKLAQKLGVEQPTLYWHVKNKRALLDALAIEMLDRHNTHFCPLEGESWQDFLRNSAKSMRCALLSHRDGAKVLLGTAVTEKQYETTENSLAFLCQQGFSLENALYAIRAVRTFTLGCVLVDQERQVAKEERETPTTDSMPPLLRQAKELLDHQGAEPAFLFGLELIICGLEKQLKCESGS

SEQ ID NO: 9 - protein, 208 aa, Artificial Sequence
  Sulfonylurea responsive repressor
MGSRLDKSKVINSALELLNEVGIEGLTTRKLAQKLGVEQPTLYWHVKNKRALLDALAIEMLDRHATHFCPLEGESWQDFLRNNAKSMRCALLSHRDGAKVWLGTAWTEKQYETPENVLAFLCQQGFSLENALYASRAVVTFTLGCVLTDQEKQVAKEERETPTTDSMPPLLRQAWELLDHQGAEPAFLFGLELIICGLEKQLKCESGS

SEQ ID NO: 10 - protein, 208 aa, Artificial Sequence
  Sulfonylurea responsive repressor
MGSRLDKSKVINSALELLNEVGIEGLTTRKLAQKLGVEQPTLYWHVKNKRALLDALAIEMMDRHQTHFCPLEGESWQDFLRNTAKSMRCALLSHRDGAKVWLGTRWTEKQYETPENMLAFLCQQGFSLENALYAWSAVCNFTLGCVLSDQERQVAKEERETPTTDSMPPLLRQAWELSDHQGAEPAFLFGLELIICGLEKQLKCESGS

SEQ ID NO: 11 - protein, 208 aa, Artificial Sequence
  Sulfonylurea responsive repressor
MGSRLDKSKVINSALELLNEVGIEGLTTRKLAQKLGVEQPTLYWHVKNKRALLDALAIEMLDRHATHFCPLEGESWQDFLRNNAKSMRCALLSHRDGAKVMLGTRATEKQYETVENRLAFLCQQGFSLENALYAVRAVHWFTLGCVLIDQEMQVAKEERETPTTDSMPPLLRQAYELYDHQGAEPAFLFGLELIICGLEKQLKCESGS

SEQ ID NO: 12 - protein, 208 aa, Artificial Sequence
  Sulfonylurea responsive repressor
MGSRLDKSKVINSALELLNEVGIEGLTTRKLAQKLGVEQPTLYWHVKNKRALLDALAIEMADRHHTHFCPLEGESWQDFLRNNAKSMRCALLSHRDGAKVWLGTAWTEKQYETTENMLAFLCQQGFSLENALYAWRAVTMFTLGCVLRDQEWQVAKEERETPTTDSMPPLLRQALELGDHQGAEPAFLFGLELIICGLEKQLKCESGS

SEQ ID NO: 13 - protein, 208 aa, Artificial Sequence
  Sulfonylurea responsive repressor
MGSRLDKSKVINSALELLNEVGIEGLTTRKLAQKLGVEQPTLYWHVKNKRALLDALAIEMLDRHATHFCPLEGESWQDFLRNNAKSYRCALLSHRDGAKVYLGTAVTEKQYETAENQLAFLCQQGFSLENALYAVKAVAGFTLGCVLWDQESQVAKEERETPTTASMPPLLRQAVELADHQGAEPAFLFGLELIICGLEKQLKCESGS

SEQ ID NO: 14 - protein, 208 aa, Artificial Sequence
  Sulfonylurea responsive repressor
MGSRLDKSKVINSALELLNEVGIEGLTTRKLAQKLGVEQPTLYWHVKNKRALLDALAIEMMDRHATHICPLEGESWQDFLRNNAKSMRCALLSHRDGAKVCLGTRWTEQQYEAAENMLAFLCQQGFSLENALYAVSAVRVFTLGCVLFDQESQVAKEERETPTTASMPPLLRQAWELKDHQGAEPAFLFGLELIICGLEKQLKCESGS

SEQ ID NO: 15 - protein, 208 aa, Artificial Sequence
  Sulfonylurea responsive repressor
  VARIANT 80, 143: Xaa = Any Amino Acid
MGSRLDKSKVINSALELLNEVGIEGLTTRKLAQKLGVEQPTLYWHVKNKRALLDALAIEMMDRHQTHYCPLEGESWQDFXRNNAKSMRCALLSHRDGAKVCLGTRWTEQQYESAENMLAFLCQQGFSLENALYAMSAVRVFTXGCVLFDQESQVAKEERETPTTASMPPLLRQAWELKDHQGAEPAFLFGLELIICGLEKQLKCESGS

SEQ ID NO: 16 - protein, 208 aa, Artificial Sequence
  Sulfonylurea responsive repressor
MGSRLDKSKVINSALELLNEVGIEGLTTRKLAQKLGVEQPTLYWHVKNKRALLDALAIEMMDRHQTHFCPLEGESWQDFLRNNAKSMRCALLSHRDGAKVCLGTRWTEKQYETAENMLAFLCQQGFSLENALYAMSAVRVFTLGCVLFDQELQVAKEERETPTTASMPPLVRQVWELKDHQGAEPAFLFGLELIICGLEKQLKCESGS

SEQ ID NO: 17 - protein, 208 aa, Artificial Sequence
  Sulfonylurea responsive repressor
MGSRLDKSKVINSALELLNEVGIEGLTTRKLAQKLGVEQPTLYWHVKNKRALLDALAIEMMDRHATHYCPLEGESWQDFLRNNAKSMRCALLSHRDGAKVCLGTRWTEKHYETAENMLAFLCQQGFSLENALYAVSAVRVFTLGCVLFDQESQVAKEERETPTTASMPPLLRQAWELKDHQGAEPAFLFGLELIICGLEKQLKCESGS

SEQ ID NO: 18 - protein, 208 aa, Artificial Sequence
  Sulfonylurea responsive repressor
MGSRLDKSKVINSALELLNEVGIEGLTTRKLAQKLGVEQPTLYWHVKNKRALLDALAIEMMDRHATHYCPLEGESWQDFLRNTAKSMRCALLSHRDGAKVCLGTRWTEQQYESAENMLAFLCQQGFSLENALYAVSAVRVFTLGCVLFDQESQVAKEERETPTTASMPPLVRQGWELKDHQGAEPAFLFGLELIICGLEKQLKCESGS

SEQ ID NO: 19 - protein, 208 aa, Artificial Sequence
  Sulfonylurea responsive repressor
MGSRLDKSKVINSALELLNEVGIEGLTTRKLAQKLGVEQPTLYWHVKNKRALLDALAIEMMDRHQTHYCPLEGESWQDFLRNNAKSMRCALLSHRDGAKVCLGTRWTEQLYETAENMLAFLCQQGFSLENALYAVSAVRVFTLGCVLFDQELQVAKEERETPTTASMPPLLRQAWELKDHQGAEPAFLFGLELIICGLEKQLKCESGS

SEQ ID NO: 20 - protein, 208 aa, Artificial Sequence
  Sulfonylurea responsive repressor
MGSRLDKSKVINSALELLNEVGIEGLTTRKLAQKLGVEQPTLYWHVKNKRALLDALAIEMMDRHATHYCPLEGESWQDFLRNNAKSMRCALLSHRDGAKVCLGTRWTEQQYETAENMLAFLCQQGFSLENALYAMSAVRVFTLGCVLFDQESQVAKEERETPTTASMPPLLRQVWELKDHQGAEPAFLFGLELIICGLEKQLKCESGS

SEQ ID NO: 21 - protein, 208 aa, Artificial Sequence
  Sulfonylurea responsive repressor
MGSRLDKSKVINSALELLNEVGIEGLTTRKLAQKLGVEQPTLYWHVKNKRALLDALAIEMMDRHQTHVCPLEGESWQDFLRNNAKSMRCALLSHRDGAKVCLGTRWTEQLYETAENQLAFLCQQGFSLENALYAMSAVRVFTLGCVLFDQELQVAKEERETPTTASMPPLLRQVWELKDHQGAEPAFLFGLELIICGLEKQLKCESGS

SEQ ID NO: 22 - protein, 208 aa, Artificial Sequence
  Sulfonylurea responsive repressor
MGSRLDKSKVINSALELLNEVGIEGLTTRKLAQKLGVEQPTLYWHVKNKRALLDALAIEMMDRHQTHICPLEGESWQDFLRNTAKSMRCALLSHRDGAKVCLGTRWTEQHYETAENQLAFLCQQGFSLENALYAMSAVRVFTLGCVLFDQESQVAKEERETPTTASMPPLVRQAWELKDHQGAEPAFLFGLELIICGLEKQLKCESGS

SEQ ID NO: 23 - protein, 208 aa, Artificial Sequence
  Sulfonylurea responsive repressor
MGSRLDKSKVINSALELLNEVGIEGLTTRKLAQKLGVEQPTLYWHVKNKRALLDALAIEMMDRHQTHVCPLEGESWQDFLRNNAKSMRCALLSHRDGAKVCLGTRWTEKQYEAAENMLAFLCQQGFSLENALYAVSAVRVFTLGCVLFDQESQVAKEERETPTTASMPPLLRQGWELKDHQGAEPAFLFGLELIICGLEKQLKCESGS

SEQ ID NO: 24 - protein, 208 aa, Artificial Sequence
  Sulfonylurea responsive repressor
MGSRLDKSKVINSALELLNEVGIEGLTTRKLAQKLGVEQPTLYWHVKNKRALLDALAIEMMDRHQTHYCPLEGESWQDFLRNTAKSMRCALLSHRDGAKVCLGTRWTEQHYETAENMLAFLCQQGFSLENALYAMSAVRVFTLGCVLFDQELQVAKEERETPTTASMPPLVRQVWELKDHQGAEPAFLFGLELIICGLEKQLKCESGS

SEQ ID NO: 25 - protein, 208 aa, Artificial Sequence
  Sulfonylurea responsive repressor
MGSRLDKSKVINSALELLNEVGIEGLTTRKLAQKLGVEQPTLYWHVKNKRALLDALAIEMMDRHQTHVCPLEGESWQDFLRNNAKSMRCALLSHRDGAKVCLGTRWTEQLYETAENQLAFLCQQGFSLENALYAMSAVRNFTLGCVLFDQESQVAKEERETPTTASMPPLVRQAWELKDHQGAEPAFLFGLELIICGLEKQLKCESGS

SEQ ID NO: 26 - protein, 208 aa, Artificial Sequence
  Sulfonylurea responsive repressor
MGSRLDKSKVINSALELLNEVGIEGLTTRKLAQKLGVEQPTLYWHVKNKRALLDALAIEMMDRHQTHYCPLEGESWQDFLRNNAKSMRCALLSHRDGAKVCLGTRWTEQLYETAENMLAFLCQQGFSLENALYAVSAVRVFTLGCVLFDQESQVAKEERETPTTASMPPLVRQVWELKDHQGAEPAFLFGLELIICGLEKQLKCESGS

SEQ ID NO: 27 - protein, 208 aa, Artificial Sequence
  Sulfonylurea responsive repressor
MGSRLDKSKVINSALELLNEVGIEGLTTRKLAQKLGVEQPTLYWHVKNKRALLDALAIEMMDRHATHVCPLEGESWQDFLRNNAKSMRCALLSHRDGAKVCLGTRWTEQMYETAENQLAFLCQQGFSLENALYAMSAVRVFTLGCVLFDQESQVAKEERETPTTASMPPLVRQAWELKDHQGAEPAFLFGLELIICGLEKQLKCESGS

SEQ ID NO: 28 - protein, 208 aa, Artificial Sequence
  Sulfonylurea responsive repressor
MGSRLDKSKVINSALELLNEVGIEGLTTRKLAQKLGVEQPTLYWHVKNKRALLDALAIEMMDRHQTHVCPLEGESWQDFLRNNAKSMRCALLSHRDGAKVCLGTRWTEKQYESAENMLAFLCQQGFSLENALYAVSAVRVFTLGCVLFDQELQVAKEERETPTTASMPPLLRQGWELNDHQGAEPAFLFGLELIICGLEKQLKCESGS

SEQ ID NO: 29 - protein, 208 aa, Artificial Sequence
  Sulfonylurea responsive repressor
MGSRLDKSKVINSALELLNEVGIEGLTTRKLAQKLGVEQPTLYWHVKNKRALLDALAIEMMDRHQTHYCPLEGESWQDFLRNNAKSMRCALLSHRDGAKVCLGTRWTEQHYEGAENMLAFLCQQGFSLENALYAMSAVRVFTLGCVLFDQELQVAKEERETPTTASMPPLVRQVWELKDHQGAEPAFLFGLELIICGLEKQLKCESGS

SEQ ID NO: 30 - protein, 208 aa, Artificial Sequence
  Sulfonylurea responsive repressor
  VARIANT 152: Xaa = Any Amino Acid
MGSRLDKSKVINSALELLNEVGIEGLTTRKLAQKLGVEQPTLYWHVKNKRALLDALAIEMMDRHATHVCPLEGESWQDFLRNNAKSMRCALLSHRDGAKVCLGTRWTEQMYETAENQLAFLCQQGFSLENALYAMSAVRVFTLGCVLFDQEXQVAKEERETPTTASMPPLLRQVWELKDHQGAEPAFLFGLELIICGLEKQLKCESGS

SEQ ID NO: 31 - protein, 208 aa, Artificial Sequence
  Sulfonylurea responsive repressor
MGSRLDKSKVINSALELLNEVGIEGLTTRKLAQKLGVEQPTLYWHVKNKRALLDALAIEMMDRHATHYCPLEGESWQDFLRNTAKSMRCALLSHRDGAKVCLGTRWTEKQYETAENQLAFLCQQGFSLENALYAMSAVRVFTLGCVLFDQELQVAKEERETPTTASMPPLVRQVWELKDHQGAEPAFLFGLELIICGLEKQLKCESGS

SEQ ID NO: 32 - protein, 208 aa, Artificial Sequence
  Sulfonylurea responsive repressor
  VARIANT 65: Xaa = Any Amino Acid
MGSRLDKSKVINSALELLNEVGIEGLTTRKLAQKLGVEQPTLYWHVKNKRALLDALAIEMMDRHXTHYCPLEGESWQDFLRNTAKSMRCALLSHRDGAKVCLGTRWTEKQYETAENQLAFLCQQGFSLENALYAMSAVRVFTLGCVLFDQESQVAKEERETPTTASMPPLVRQGWELKDHQGAEPAFLFGLELIICGLEKQLKCESGS

SEQ ID NO: 33 - protein, 208 aa, Artificial Sequence
  Sulfonylurea responsive repressor
MGSRLDKSKVINSALELLNEVGIEGLTTRKLAQKLGVEQPTLYWHVKNKRALLDALAIEMMDRHQTHMCPLEGESWQDFLRNNAKSMRCALLSHRDGAKVCLGTRWTEKHYETAENMLAFLCQQGFSLENALYAVSAVRVFTLGCVLFDQESQVAKEERETPTTASMPPLVRQGWELKDHQGAEPAFLFGLELIICGLEKQLKCESGS

SEQ ID NO: 34 - protein, 208 aa, Artificial Sequence
  Sulfonylurea responsive repressor
MGSRLDKSKVINSALELLNEVGIEGLTTRKLAQKLGVEQPTLYWHVKNKRALLDALAIEMMDRHQTHLCPLEGESWQDFLRNNAKSMRCALLSHRDGAKVCLGTRWTEKQYESAENMLAFLCQQGFSLENALYAMSAVRVFTLGCVLFDQESQVAKEERETPTTASMPPLVRQVWELKDHQGAEPAFLFGLELIICGLEKQLKCESGS

SEQ ID NO: 35 - protein, 208 aa, Artificial Sequence
  Sulfonylurea responsive repressor
MGSRLDKSKVINSALELLNEVGIEGLTTRKLAQKLGVEQPTLYWHVKNKRALLDALAIEMMDRHQTHYCPLEGESWQDFLRNTAKSMRCALLSHRDGAKVCLGTRWTEKHYETAENQLAFLCQQGFSLENALYAVSAVRVFTLGCVLFDQESQVAKEERETPTTASMPPLVRQVWELKDHQGAEPAFLFGLELIICGLEKQLKCESGS

SEQ ID NO: 36 - protein, 208 aa, Artificial Sequence
  Sulfonylurea responsive repressor
MGSRLDKSKVINSALELLNEVGIEGLTTRKLAQKLGVEQPTLYWHVKNKRALLDALAIEMMDRHQTHYCPLEGESWQDFLRNTAKSMRCALLSHRDGAKVCLGTRWTEQLYETAENQLAFLCQQGFSLENALYAMSAVRVFTLGCVLFDQELQVAKEERETPTTASMPPLLRQAWELKDHQGAEPAFLFGLELIICGLEKQLKCESGS

SEQ ID NO: 37 - protein, 208 aa, Artificial Sequence
  Sulfonylurea responsive repressor
  VARIANT 68, 113: Xaa = Any Amino Acid
MGSRLDKSKVINSALELLNEVGIEGLTTRKLAQKLGVEQPTLYWHVKNKRALLDALAIEMMDRHQTHXCPLEGESWQDFLRNTAKSMRCALLSHRDGAKVCLGTRWTEQQYEXAENLLAFLCQQGFSLENALYAMSAVRVFTLGCVLFDQEIQVAKEERETPTTASMPPLLRQVLELKDHQGAEPAFLFGLELIICGLEKQLKCESGS

SEQ ID NO: 38 - protein, 208 aa, Artificial Sequence
  Sulfonylurea responsive repressor
MGSRLDKSKVINSALELLNEVGIEGLTTRKLAQKLGVEQPTLYWHVKNKRALLDALAIEMMDRHQTHYCPLEGESWQDFLRNTAKSMRCALLSHRDGAKVCLGTRWTEKHYETAENMLAFLCQQGFSLENALYAVSAVRVFTLGCVLFDQESQVAKEERETPTTASMPPLLRQVWELKDHQGAEPAFLFGLELIICGLEKQLKCESGS

SEQ ID NO: 39 - protein, 208 aa, Artificial Sequence
  Sulfonylurea responsive repressor
MGSRLDKSKVINSALELLNEVGIEGLTTRKLAQKLGVEQPTLYWHVKNKRALLDALAIEMMDRHQTHVCPLEGESWQDFLRNNAKSMRCALLSHRDGAKVCLGTRWTEQLYETAENMLAFLCQQGFSLENALYAMSAVRVFTLGCVLFDQESQVAKEERETPTTASMPPLVRQGWELKDHQGAEPAFLFGLELIICGLEKQLKCESGS

SEQ ID NO: 40 - protein, 208 aa, Artificial Sequence
  Sulfonylurea responsive repressor
  VARIANT 110: Xaa = Any Amino Acid
MGSRLDKSKVINSALELLNEVGIEGLTTRKLAQKLGVEQPTLYWHVKNKRALLDALAIEMMDRHATHLCPLEGESWQDFLRNNAKSMRCALLSHRDGAKVCLGTRWTEKXYESAENQLAFLCQQGFSLENALYAMSAVRVFTLGCVLFDQELQVAKEERETPTTASMPPLLRQAWELKDHQGAEPAFLFGLELIICGLEKQLKCESGS

SEQ ID NO: 41 - protein, 208 aa, Artificial Sequence
  Sulfonylurea responsive repressor
MGSRLDKSKVINSALELLNEVGIEGLTTRKLAQKLGVEQPTLYWHVKNKRALLDALAIEMMDRHQTHYCPLEGESWQDFLRNTAKSMRCALLSHRDGAKVCLGTRWTEQQYETAENMLAFLCQQGFSLENALYAVSAVRNFTLGCVLFDQESQVAKEERETPTTASMPPLVRQAWELKDHQGAEPAFLFGLELIICGLEKQLKCESGS

SEQ ID NO: 42 - protein, 208 aa, Artificial Sequence
  Sulfonylurea responsive repressor
MGSRLDKSKVINSALELLNEVGIEGLTTRKLAQKLGVEQPTLYWHVKNKRALLDALAIEMMDRHQTHFCPLEGESWQDFLRNNAKSMRCALLSHRDGAKVWLGTRWTEQMYETAENMLAFLCQQGFSLENALYAVSAVRNFTLGCVLFDQESQVAKEERETPTTASMPPLLRQGWELKDHQGAEPAFLFGLELIICGLEKQLKCESGS

SEQ ID NO: 43 - protein, 208 aa, Artificial Sequence
  Sulfonylurea responsive repressor
MGSRLDKSKVINSALELLNEVGIEGLTTRKLAQKLGVEQPTLYWHVKNKRALLDALAIEMMDRHQTHFCPLEGESWQDFLRNTAKSMRCALLSHRDGAKVCLGTRWTEQQYETAENMLAFLCQQGFSLENALYAMSAVRVFTLGCVLFDQESQVAKEERETPTTASMPPLVRQAWELKDHQGAEPAFLFGLELIICGLEKQLKCESGS

SEQ ID NO: 44 - protein, 208 aa, Artificial Sequence
  Sulfonylurea responsive repressor
MGSRLDKSKVINSALELLNEVGIEGLTTRKLAQKLGVEQPTLYWHVKNKRALLDALAIEMMDRHQTHYCPLEGESWQDFLRNTAKSMRCALLSHRDGAKVCLGTRWTEQQYESAENQLAFLCQQGFSLENALYAVSAVRVFTLGCVLFDQESQVAKEERETPTTASMPPLLRQAWELKDHQGAEPAFLFGLELIICGLEKQLKCESGS

SEQ ID NO: 45 - protein, 208 aa, Artificial Sequence
  Sulfonylurea responsive repressor
MGSRLDKSKVINSALELLNEVGIEGLTTRKLAQKLGVEQPTLYWHVKNKRALLDALAIEMMDRHQTHMCPLEGESWQDFLRNNAKSMRCALLSHRDGAKVCLGTRWTEKMYEAAENMLAFLCQQGFSLENALYAVSAVRVFTLGCVLFDQELQVAKEERETPTTASMPPLLRQAWELKDHQGAEPAFLFGLELIICGLEKQLKCESGS

SEQ ID NO: 46 - protein, 208 aa, Artificial Sequence
  Sulfonylurea responsive repressor
MGSRLDKSKVINSALELLNEVGIEGLTTRKLAQKLGVEQPTLYWHVKNKRALLDALAIEMMDRHATHYCPLEGESWQDFIRNTAKSMRCALLSHRDGAKVCLGTRWTEKHYETAENMLAFLCQQGFSLENALYAVSAVGNFTLGCVLFDQESQVAKEERETPTTASMPPLLRQVWELKDHQGAEPAFLFGLELIICGLEKQLKCESGS

SEQ ID NO: 47 - protein, 208 aa, Artificial Sequence
  Sulfonylurea responsive repressor
MGSRLDKSKVINSALELLNEVGIEGLTTRKLAQKLGVEQPTLYWHVKNKRALLDALAIEMMDRHATHLCPLEGESWQDFLRNTAKSMRCALLSHRDGAKVCLGTRWTEKQYESAENQLAFLCQQGFSLENALYAMSAVRVFTLGCVLFDQESQVAKEERETPTTASMPPLLRQVWELKDHQGAEPAFLFGLELIICGLEKQLKCESGS

SEQ ID NO: 48 - protein, 208 aa, Artificial Sequence
  Sulfonylurea responsive repressor
MGSRLDKSKVINSALELLNEVGIEGLTTRKLAQKLGVEQPTLYWHVKNKRALLDALAIEMMDRHQTHYCPLEGESWQDFLRNNAKSMRCALLSHRDGAKVCLGTRWTEQMYESAENMLAFLCQQGFSLENALYAVSAVRVFTLGCVLFDQESQVAKEERETPTTASMPPLLRQGWELKDHQGAEPAFLFGLELIICGLEKQLKCESGS

SEQ ID NO: 49 - protein, 208 aa, Artificial Sequence
  Sulfonylurea responsive repressor
MGSRLDKSKVINSALELLNEVGIEGLTTRKLAQKLGVEQPTLYWHVKNKRALLDALAIEMMDRHQTHFCPLEGESWQDFLRNNAKSMRCALLSHRDGAKVCLGTRWTEQMYEGAENMLAFLCQQGFSLENALYAMSAVRVFTLGCVLFDQESQVAKEERETPTTASMPPLLRQGWELKDHQGAEPAFLFGLELIICGLEKQLKCESGS

SEQ ID NO: 50 - protein, 208 aa, Artificial Sequence
  Sulfonylurea responsive repressor
MGSRLDKSKVINSALELLNEVGIEGLTTRKLAQKLGVEQPTLYWHVKNKRALLDALAIEMMDRHQTHYCPLEGESWQDFLRNNAKSMRCALLSHRDGAKVCLGTRWTEQHYEAAENMLAFLCQQGFSLENALYAMSAVRVFTLGCVLFDQESQVAKEERETPTTASMPPLVRQAWELKDHQGAEPAFLFGLELIICGLEKQLKCESGS

SEQ ID NO: 51 - protein, 208 aa, Artificial Sequence
  Sulfonylurea responsive repressor
MGSRLDKSKVINSALELLNEVGIEGLTTRKLAQKLGVEQPTLYWHVKNKRALLDALAIEMMDRHATHYCPLEGESWQDFLRNNAKSMRCALLSHRDGAKVCLGTRWTEQLYETAENQLAFLCQQGFSLENALYAMSAVRNFTLGCVLFDQESQVAKEERETPTTASMPPLVRQAWELKDHQGAEPAFLFGLELIICGLEKQLKCESGS

SEQ ID NO: 52 - protein, 208 aa, Artificial Sequence
  Sulfonylurea responsive repressor
MGSRLDKSKVINSALELLNEVGIEGLTTRKLAQKLGVEQPTLYWHVKNKRALLDALAIEMMDRHATHMCPLEGESWQDFLRNTAKSMRCALLSHRDGAKVCLGTRWTEKQYETAENMLAFLCQQGFSLENALYAVSAVRVFTLGCVLFDQESQVAKEERETPTTASMPPLLRQVWELKDHQGAEPAFLFGLELIICGLEKQLKCESGS

SEQ ID NO: 53 - protein, 208 aa, Artificial Sequence
  Sulfonylurea responsive repressor
MGSRLDKSKVINSALELLNEVGIEGLTTRKLAQKLGVEQPTLYWHVKNKRALLDALAIEMMDRHATHYCPLEGESWQDFLRNTAKSMRCALLSHRDGAKVCLGTRWTEKLYETAENMLAFLCQQGFSLENALYAVSAVRVFTLGCVLFDQELQVAKEERETPTTASMPPLVRQAWELKDHQGAEPAFLFGLELIICGLEKQLKCESGS

SEQ ID NO: 54 - protein, 208 aa, Artificial Sequence
  Sulfonylurea responsive repressor
MGSRLDKSKVINSALELLNEVGIEGLTTRKLAQKLGVEQPTLYWHVKNKRALLDALAIEMMDRHATHFCPLEGESWQDFLRNTAKSMRCALLSHRDGAKVCLGTRWTEQLYETAENMLAFLCQQGFSLENALYAMSAVRVFTLGCVLFDQESQVAKEERETPTTASMPPLVRQGWELKDHQGAEPAFLFGLELIICGLEKQLKCESGS

SEQ ID NO: 55 - protein, 208 aa, Artificial Sequence
  Sulfonylurea responsive repressor
MGSRLDKSKVINSALELLNEVGIEGLTTRKLAQKLGVEQPTLYWHVKNKRALLDALAIEMMDRHQTHLCPLEGESWQDFLRNNAKSMRCALLSHRDGAKVCLGTRWTEKHYEAAENQLAFLCQQGFSLENALYAMSAVRVFTLGCVLFDQESQVAKEERETPTTASMPPLLRQGWELKDHQGAEPAFLFGLELIICGLEKQLKCESGS

SEQ ID NO: 56 - protein, 208 aa, Artificial Sequence
  Sulfonylurea responsive repressor
  VARIANT 65, 110: Xaa = Any Amino Acid
MGSRLDKSKVINSALELLNEVGIEGLTTRKLAQKLGVEQPTLYWHVKNKRALLDALAIEMMDRHXTHYCPLEGESWQDFLRNNAKSMRCALLSHRDGAKVWLGTRWTEQXYETAENQLAFLCQQGFSLENALYAVSAVRVFTLGCVLFDQELQVAKEERETPTTASMPPLLRQGLELKDHQGAEPAFLFGLELIICGLEKQLKCESGS

SEQ ID NO: 57 - protein, 208 aa, Artificial Sequence
  Sulfonylurea responsive repressor
MGSRLDKSKVINSALELLNEVGIEGLTTRKLAQKLGVEQPTLYWHVKNKRALLDALAIEMMDRHATHYCPLEGESWQDFLRNTAKSMRCALLSHRDGAKVCLGTRWTEQQYESAENMLAFLCQQGFSLENALYAMSAVRVFTLGCVLFDQELQVAKEERETPTTASMPPLVRQGWELKDHQGAEPAFLFGLELIICGLEKQLKCESGS

SEQ ID NO: 58 - protein, 208 aa, Artificial Sequence
  Sulfonylurea responsive repressor
MGSRLDKSKVINSALELLNEVGIEGLTTRKLAQKLGVEQPTLYWHVKNKRALLDALAIEMMDRHATHYCPLEGESWQDFLRNTAKSMRCALLSHRDGAKVCLGTRWTEQQYETAENMLAFLCQQGFSLENALYAVSAVRVFTLGCVLFDQELQVAKEERETPTTASMPPLVRQAWELKDHQGAEPAFLFGLELIICGLEKQLKCESGS

SEQ ID NO: 59 - protein, 208 aa, Artificial Sequence
  Sulfonylurea responsive repressor
  VARIANT 68, 83, 101, 171: Xaa = Any Amino Acid
MGSRLDKSKVINSALELLNEVGIEGLTTRKLAQKLGVEQPTLYWHVKNKRALLDALAIEMMDRHPTHXCPLEGESWQDFLRNXAKSMRCALLSHRDGAKVXLGTRWTEQLYETAENMLAFLCQQGFSLENALYAMSAVRVFTLGCVLFDQESQVAKEERETPTTASMPPLXRQVWELKDHQGAEPAFLFGLELIICGLEKQLKCESGS

SEQ ID NO: 60 - protein, 208 aa, Artificial Sequence
  Sulfonylurea responsive repressor
  VARIANT 171: Xaa = Any Amino Acid
MGSRLDKSKVINSALELLNEVGIEGLTTRKLAQKLGVEQPTLYWHVKNKRALLDALAIEMMDRHATHYCPLEGESWQDFLRNNAKSMRCALLSHRDGAKVCLGTRWTEQLYETAENQLAFLCQQGFSLENALYAVSAVRVFTLGCVLFDQESQVAKEERETPTTASMPPLXRQGWELKDHQGAEPAFLFGLELIICGLEKQLKCESGS

SEQ ID NO: 61 - protein, 208 aa, Artificial Sequence
  Sulfonylurea responsive repressor
MGSRLDKSKVINSALELLNEVGIEGLTTRKLAQKLGVEQPTLYWHVKNKRALLDALAIEMMDRHQTHYCPLEGESWQDFLRNNAKSMRCALLSHRDGAKVCLGTRWTEQQYEAAENQLAFLCQQGFSLENALYAMSAVRVFTLGCVLFDQELQVAKEERETPTTASMPPLVRQAWELKDHQGAEPAFLFGLELIICGLEKQLKCESGS

SEQ ID NO: 62 - protein, 208 aa, Artificial Sequence
  Sulfonylurea responsive repressor
MGSRLDKSKVINSALELLNEVGIEGLTTRKLAQKLGVEQPTLYWHVKNKRALLDALAIEMMDRHQTHYCPLEGESWQDFLRNTAKSMRCALLSHRDGAKVCLGTRWTEQMYESAENMLAFLCQQGFSLENALYAVSAVRVFTLGCVLFDQESQVAKEERETPTTASMPPLLRQGWELKDHQGAEPAFLFGLELIICGLEKQLKCESGS

SEQ ID NO: 63 - protein, 208 aa, Artificial Sequence
  Sulfonylurea responsive repressor
MGSRLDKSKVINSALELLNEVGIEGLTTRKLAQKLGVEQPTLYWHVKNKRALLDALAIEMMDRHQTHYCPLEGESWQDFLRNNAKSMRCALLSHRDGAKVCLGTRWTEQQYESAENQLAFLCQQGFSLENALYAVSAVRVFTLGCVLFDQESQVAKEERETPTTASMPPLVRQAWELKDHQGAEPAFLFGLELIICGLEKQLKCESGS

SEQ ID NO: 64 - protein, 208 aa, Artificial Sequence
  Sulfonylurea responsive repressor
MGSRLDKSKVINSALELLNEVGIEGLTTRKLAQKLGVEQPTLYWHVKNKRALLDALAIEMMDRHQTHYCPLEGESWQDFLRNNAKSMRCALLSHRDGAKVCLGTRWTEKLYETAENMLAFLCQQGFSLENALYAVSAVRVFTLGCVLFDQESQVAKEERETPTTASMPPLLRQVWELKDHQGAEPAFLFGLELIICGLEKQLKCESGS

SEQ ID NO: 65 - protein, 208 aa, Artificial Sequence
  Sulfonylurea responsive repressor
MGSRLDKSKVINSALELLNEVGIEGLTTRKLAQKLGVEQPTLYWHVKNKRALLDALAIEMMDRHATHYCPLEGESWQDFLRNTAKSMRCALLSHRDGAKVCLGTRWTEQMYETAENMLAFLCQQGFSLENALYAMSAVRVFTLGCVLFDQELQVAKEERETPTTASMPPLVRQGWELKDHQGAEPAFLFGLELIICGLEKQLKCESGS

SEQ ID NO: 66 - protein, 208 aa, Artificial Sequence
  Sulfonylurea responsive repressor
MGSRLDKSKVINSALELLNEVGIEGLTTRKLAQKLGVEQPTLYWHVKNKRALLDALAIEMMDRHQTHYCPLEGESWQDFLRNNAKSMRCALLSHRDGAKVCLGTRWTEQMYETAENQLAFLCQQGFSLENALYAMSAVRVFTLGCVLFDQELQVAKEERETPTTASMPPLLRQGWELKDHQGAEPAFLFGLELIICGLEKQLKCESGS

SEQ ID NO: 67 - protein, 208 aa, Artificial Sequence
  Sulfonylurea responsive repressor
MGSRLDKSKVINSALELLNEVGIEGLTTRKLAQKLGVEQPTLYWHVKNKRALLDALAIEMMDRHATHYCPLEGESWQDFLRNTAKSMRCALLSHRDGAKVCLGTRWTEQQYEAAENQLAFLCQQGFSLENALYAVSAVRVFTLGCVLFDQESQVAKEERETPTTASMPPLLRQGWELKDHQGAEPAFLFGLELIICGLEKQLKCESGS

SEQ ID NO: 68 - protein, 208 aa, Artificial Sequence
  Sulfonylurea responsive repressor
MGSRLDKSKVINSALELLNEVGIEGLTTRKLAQKLGVEQPTLYWHVKNKRALLDALAIEMMDRHQTHYCPLEGESWQDFLRNTAKSMRCALLSHRDGAKVWLGTRWTEQQYESAENMLAFLCQQGFSLENALYAVSAVRVFTLGCVLFDQELQVAKEERETPTTASMPPLVRQAWELKDHQGAEPAFLFGLELIICGLEKQLKCESGS

SEQ ID NO: 69 - protein, 208 aa, Artificial Sequence
  Sulfonylurea responsive repressor
MGSRLDKSKVINSALELLNEVGIEGLTTRKLAQKLGVEQPTLYWHVKNKRALLDALAIEMMDRHQTHMCPLEGESWQDFLRNNAKSMRCALLSHRDGAKVCLGTRWTEKLYETAENQLAFLCQQGFSLENALYAVSAVRVFTLGCVLFDQESQVAKEERETPTTASMPPLVRQAWELKDHQGAEPAFLFGLELIICGLEKQLKCESGS

SEQ ID NO: 70 - protein, 208 aa, Artificial Sequence
  Sulfonylurea responsive repressor
MGSRLDKSKVINSALELLNEVGIEGLTTRKLAQKLGVEQPTLYWHVKNKRALLDALAIEMMDRHQTHYCPLEGESWQDFLRNTAKSMRCALLSHRDGAKVCLGTRWTEKQYETAENMLAFLCQQGFSLENALYAMSAVRVFTLGCVLFDQESQVAKEERETPTTASMPPLVRQVWELKDHQGAEPAFLFGLELIICGLEKQLKCESGS

SEQ ID NO: 71 - protein, 208 aa, Artificial Sequence
  Sulfonylurea responsive repressor
MGSRLDKSKVINSALELLNEVGIEGLTTRKLAQKLGVEQPTLYWHVKNKRALLDALAIEMMDRHQTHFCPLEGESWQDFLRNNAKSMRCALLSHRDGAKVCLGTRWTEQQYESAENQLAFLCQQGFSLENALYAVSAVRVFTLGCVLFDQELQVAKEERETPTTASMPPLLRQALELKDHQGAEPAFLFGLELIICGLEKQLKCESGS

SEQ ID NO: 72 - protein, 208 aa, Artificial Sequence
  Sulfonylurea responsive repressor
MGSRLDKSKVINSALELLNEVGIEGLTTRKLAQKLGVEQPTLYWHVKNKRALLDALAIEMMDRHATHYCPLEGESWQDFLRNNAKSMRCALLSHRDGAKVCLGTRWTEKQYESAENMLAFLCQQGFSLENALYAVSAVRNFTLGCVLFDQESQVAKEERETPTTASMPPLLRQGWELKDHQGAEPAFLFGLELIICGLEKQLKCESGS

SEQ ID NO: 73 - protein, 208 aa, Artificial Sequence
  Sulfonylurea responsive repressor
MGSRLDKSKVINSALELLNEVGIEGLTTRKLAQKLGVEQPTLYWHVKNKRALLDALAIEMMDRHATHMCPLEGESWQDFLRNNAKSMRCALLSHRDGAKVCLGTRWTEKHYESAENMLAFLCQQGFSLENALYAVSAVRVFTLGCVLFDQELQVAKEERETPTTASMPPLVRQVWELKDHQGAEPAFLFGLELIICGLEKQLKCESGS

SEQ ID NO: 74 - protein, 208 aa, Artificial Sequence
  Sulfonylurea responsive repressor
  VARIANT 65, 117: Xaa = Any Amino Acid
MGSRLDKSKVINSALELLNEVGIEGLTTRKLAQKLGVEQPTLYWHVKNKRALLDALAIEMMDRHXTHLCPLEGESWQDFLRNTAKSMRCALLSHRDGAKVCLGTRWTEQLYEAAENXLAFLCQQGFSLENALYAMSAVRVFTLGCVLFDQESQVAKEERETPTTASMPPLVRQVWELKDHQGAEPAFLFGLELIICGLEKQLKCESGS

SEQ ID NO: 75 - protein, 208 aa, Artificial Sequence
  Sulfonylurea responsive repressor
MGSRLDKSKVINSALELLNEVGIEGLTTRKLAQKLGVEQPTLYWHVKNKRALLDALAIEMMDRHQTHYCPLEGESWQDFLRNNAKSMRCALLSHRDGAKVCLGTRWTEQHYEGAENMLAFLCQQGFSLENALYAVSAVRVFTLGCVLFDQESQVAKEERETPTTASMPPLLRQVWELKDHQGAEPAFLFGLELIICGLEKQLKCESGS

SEQ ID NO: 76 - protein, 208 aa, Artificial Sequence
  Sulfonylurea responsive repressor
MGSRLDKSKVINSALELLNEVGIEGLTTRKLAQKLGVEQPTLYWHVKNKRALLDALAIEMMDRHATHICPLEGESWQDFLRNNAKSMRCALLSHRDGAKVCLGTRWTEQLYESAENMLAFLCQQGFSLENALYAVSAVRVFTLGCVLFDQESQVAKEERETPTTASMPPLVRQVWELKDHQGAEPAFLFGLELIICGLEKQLKCESGS

SEQ ID NO: 77 - protein, 208 aa, Artificial Sequence
  Sulfonylurea responsive repressor
MGSRLDKSKVINSALELLNEVGIEGLTTRKLAQKLGVEQPTLYWHVKNKRALLDALAIEMMDRHQTHYCPLEGESWQDFLRNNAKSMRCALLSHRDGAKVCLGTRWTEKQYETAENQLAFLCQQGFSLENALYAMSAVRNFTLGCVLFDQESQVAKEERETPTTASMPPLLRQGWELKDHQGAEPAFLFGLELIICGLEKQLKCESGS

SEQ ID NO: 78 - protein, 208 aa, Artificial Sequence
  Sulfonylurea responsive repressor
MGSRLDKSKVINSALELLNEVGIEGLTTRKLAQKLGVEQPTLYWHVKNKRALLDALAIEMMDRHQTHYCPLEGESWQDFLRNNAKSMRCALLSHRDGAKVCLGTRWTEQHYETAENMLAFLCQQGFSLENALYAMSAVRVFTLGCVLFDQESQVAKEERETPTTASMPPLLRQGWELKDHQGAEPAFLFGLELIICGLEKQLKCESGS

SEQ ID NO: 79 - protein, 208 aa, Artificial Sequence
  Sulfonylurea responsive repressor
  VARIANT 110, 113, 117, 135, 140: Xaa = Any Amino Acid
MGSRLDKSKVINSALELLNEVGIEGLTTRKLAQKLGVEQPTLYWHVKNKRALLDALAIEMMDRHPTHLCPLEGESWQDFLRNTAKSMRCALLSHRDGAKVCLGTRWTEQXYEXAENXLAFLCQQGFSLENALYAXSAVRXFTLGCVLFDQEIQVAKEERETPTTASMPPLVRQAWELKDHQGAEPAFLFGLELIICGLEKQLKCESGS

SEQ ID NO: 80 - protein, 208 aa, Artificial Sequence
  Sulfonylurea responsive repressor
MGSRLDKSKVINSALELLNEVGIEGLTTRKLAQKLGVEQPTLYWHVKNKRALLDALAIEMMDRHATHICPLEGESWQDFLRNNAKSMRCALLSHRDGAKVCLGTRWTEQMYETAENQLAFLCQQGFSLENALYAMSAVRVFTLGCVLFDQELQVAKEERETPTTASMPPLLRQVWELKDHQGAEPAFLFGLELIICGLEKQLKCESGS

SEQ ID NO: 81 - protein, 208 aa, Artificial Sequence
  Sulfonylurea responsive repressor
MGSRLDKSKVINSALELLNEVGIEGLTTRKLAQKLGVEQPTLYWHVKNKRALLDALAIEMMDRHQTHICPLEGESWQDFLRNNAKSMRCALLSHRDGAKVCLGTRWTEKHYETAENMLAFLCQQGFSLENALYAMSAVRVFTLGCVLFDQESQVAKEERETPTTASMPPLVRQVWELKDHQGAEPAFLFGLELIICGLEKQLKCESGS

SEQ ID NO: 82 - protein, 208 aa, Artificial Sequence
  Sulfonylurea responsive repressor
MGSRLDKSKVINSALELLNEVGIEGLTTRKLAQKLGVEQPTLYWHVKNKRALLDALAIEMMDRHQTHVCPLEGESWQDFLRNTAKSMRCALLSHRDGAKVCLGTRWTEQLYETAENMLAFLCQQGFSLENALYAVSAVRVFTLGCVLFDQESQVAKEERETPTTARMPPLLRQGWELKDHQGAEPAFLFGLELIICGLEKQLKCESGS

SEQ ID NO: 83 - protein, 208 aa, Artificial Sequence
  Sulfonylurea responsive repressor
MGSRLDKSKVINSALELLNEVGIEGLTTRKLAQKLGVEQPTLYWHVKNKRALLDALAIEMMDRHQTHYCPLEGESWQDFLRNTAKSMRCALLSHRDGAKVCLGTRWTEQLYESAENMLAFLCQQGFSLENALYAMSAVRVFTLGCVLFDQELQVAKEERETPTTASMPPLLRQGWELKDHQGAEPAFLFGLELIICGLEKQLKCESGS

SEQ ID NO: 84 - protein, 208 aa, Artificial Sequence
  Sulfonylurea responsive repressor
MGSRLDKSKVINSALELLNEVGIEGLTTRKLAQKLGVEQPTLYWHVKNKRALLDALAIEMMDRHQTHYCPLEGESWQDFLRNTAKSMRCALLSHRDGAKVCLGTRWTEKQYETAENQLAFLCQQGFSLENALYAVSAVRVFTLGCVLFDQESQVAKEERETPTTASMPPLVRQVWELKDHQGAEPAFLFGLELIICGLEKQLKCESGS

SEQ ID NO: 85 - protein, 208 aa, Artificial Sequence
  Sulfonylurea responsive repressor
MGSRLDKSKVINSALELLNEVGIEGLTTRKLAQKLGVEQPTLYWHVKNKRALLDALAIEMMDRHATHYCPLEGESWQDFLRNNAKSMRCALLSHRDGAKVCLGTRWTEQHYETAENQLAFLCQQGFSLENALYAMSAVRVFTLGCVLFDQESQVAKEERETPTTASMPPLVRQGWELKDHQGAEPAFLFGLELIICGLEKQLKCESGS

SEQ ID NO: 86 - protein, 208 aa, Artificial Sequence
  Sulfonylurea responsive repressor
MGSRLDKSKVINSALELLNEVGIEGLTTRKLAQKLGVEQPTLYWHVKNKRALLDALAIEMMDRHQTHYCPLEGESWQDFLRNNAKSMRCALLSHRDGAKVCLGTRWTEKHYETAENQLAFLCQQGFSLENALYAMSAVRVFTLGCVLFDQESQVAKEERETPTTASMPPLLRQAWELKDHQGAEPAFLFGLELIICGLEKQLKCESGS

SEQ ID NO: 87 - protein, 208 aa, Artificial Sequence
  Sulfonylurea responsive repressor
MGSRLDKSKVINSALELLNEVGIEGLTTRKLAQKLGVEQPTLYWHVKNKRALLDALAIEMMDRHQTHYCPLEGESWQDFLRNNAKSMRCALLSHRDGAKVCLGTRWTEQHYEAAENMLAFLCQQGFSLENALYAVSAVRVFTLGCVLFDQESQVAKEERETPTTASMPPLLRQVWELKDHQGAEPAFLFGLELIICGLEKQLKCESGS

SEQ ID NO: 88 - protein, 208 aa, Artificial Sequence
  Sulfonylurea responsive repressor
MGSRLDKSKVINSALELLNEVGIEGLTTRKLAQKLGVEQPTLYWHVKNKRALLDALAIEMMDRHQTHYCPLEGESWQDFLRNNAKSMRCALLSHRDGAKVCLGTRWTEQMYEAAENQLAFLCQQGFSLENALYAVSAVRVFTLGCVLFDQELQVAKEERETPTTASMPPLVRQVWELKDHQGAEPAFLFGLELIICGLEKQLKCESGS

SEQ ID NO: 89 - protein, 208 aa, Artificial Sequence
  Sulfonylurea responsive repressor
MGSRLDKSKVINSALELLNEVGIEGLTTRKLAQKLGVEQPTLYWHVKNKRALLDALAIEMMDRHQTHYCPLEGESWQDFLRNNAKSMRCALLSHRDGAKVCLGTRWTEKLYEAAENMLAFLCQQGFSLENALYAVSAVRVFTLGCVLFDQESQVAKEERETPTTASMPPLVRQVWELKDHQGAEPAFLFGLELIICGLEKQLKCESGS

SEQ ID NO: 90 - protein, 208 aa, Artificial Sequence
  Sulfonylurea responsive repressor
  VARIANT 140: Xaa = Any Amino Acid
MGSRLDKSKVINSALELLNEVGIEGLTTRKLAQKLGVEQPTLYWHVKNKRALLDALAIEMMDRHQTHYCPLEGESWQDFLRNTAKSMRCALLSHRDGAKVCLGTRWTEQMYEAAENMLAFLCQQGFSLENALYAMSAVRXFTLGCVLFDQESQVAKEERETPTTASMPPLVRQAWELKDHQGAEPAFLFGLELIICGLEKQLKCESGS

SEQ ID NO: 91 - protein, 208 aa, Artificial Sequence
  Sulfonylurea responsive repressor
  VARIANT 113, 140: Xaa = Any Amino Acid
MGSRLDKSKVINSALELLNEVGIEGLTTRKLAQKLGVEQPTLYWHVKNKRALLDALAIEMMDRHATHYCPLEGESWQDFLRNNAKSMRCALLSHRDGAKVCLGTRWTEQLYEXAENQLAFLCQQGFSLENALYAMSAVRXFTLGCVLFDQESQVAKEERETPTTASMPPLVRQGWELKDHQGAEPAFLFGLELIICGLEKQLKCESGS

SEQ ID NO: 92 - protein, 208 aa, Artificial Sequence
  Sulfonylurea responsive repressor
MGSRLDKSKVINSALELLNEVGIEGLTTRKLAQKLGVEQPTLYWHVKNKRALLDALAIEMMDRHQTHYCPLEGESWQDFLRNTAKSMRCALLSHRDGAKVCLGTRWTEKQYESAENQLAFLCQQGFSLENALYAMSAVRVFTLGCVLFDQESQVAKEERETPTTASMPPLVRQGWELKDHQGAEPAFLFGLELIICGLEKQLKCESGS

SEQ ID NO: 93 - protein, 208 aa, Artificial Sequence
  Sulfonylurea responsive repressor
MGSRLDKSKVINSALELLNEVGIEGLTTRKLAQKLGVEQPTLYWHVKNKRALLDALAIEMMDRHQTHYCPLEGESWQDFLRNNAKSMRCALLSHRDGAKVCLGTRWTEQHYEAAENQLAFLCQQGFSLENALYAVSAVRVFTLGCVLFDQESQVAKEERETPTTASMPPLVRQVWELKDHQGAEPAFLFGLELIICGLEKQLKCESGS

SEQ ID NO: 94 - protein, 208 aa, Artificial Sequence
  Sulfonylurea responsive repressor
MGSRLDKSKVINSALELLNEVGIEGLTTRKLAQKLGVEQPTLYWHVKNKRALLDALAIEMMDRHATHYCPLEGESWQDFLRNTAKSMRCALLSHRDGAKVCLGTRWTEQHYESAENMLAFLCQQGFSLENALYAVSAVRVFTLGCVLFDQESQVAKEERETPTTASMPPLVRQAWELKVHQGAEPAFLFGLELIICGLEKQLKCESGS

SEQ ID NO: 95 - protein, 208 aa, Artificial Sequence
  Sulfonylurea responsive repressor
MGSRLDKSKVINSALELLNEVGIEGLTTRKLAQKLGVEQPTLYWHVKNKRALLDALAIEMMDRHATHYCPLEGESWQDFLRNNAKSMRCALLSHRDGAKVCLGTRWTEQHYESAENQLAFLCQQGFSLENALYAVSAVRVFTLGCVLFDQELQVAKEERETPTTASMPPLLRQVWELKDHQGAEPAFLFGLELIICGLEKQLKCESGS

SEQ ID NO: 96 - protein, 208 aa, Artificial Sequence
  Sulfonylurea responsive repressor
MGSRLDKSKVINSALELLNEVGIEGLTTRKLAQKLGVEQPTLYWHVKNKRALLDALAIEMMDRHATHYCPLEGESWQDFLRNTAKSMRCALLSHRDGAKVCLGTRWTEKQYEAAENQLAFLCQQGFSLENALYAVSAVGNFTLGCVLFDQELQVAKEERETPTTASMPPLVRQALELKDHQGAEPAFLFGLELIICGLEKQLKCESGS

SEQ ID NO: 97 - protein, 208 aa, Artificial Sequence
  Sulfonylurea responsive repressor
MGSRLDKSKVINSALELLNEVGIEGLTTRKLAQKLGVEQPTLYWHVKNKRALLDALAIEMMDRHATHYCPLEGESWQDFLRNTAKSMRCALLSHRDGAKVCLGTRWTEQQYETAENQLAFLCQQGFSLENALYAMSAVRNFTLGCVLFDQESQVAKEERETPTTASMPPLLRQAWELKDHQGAEPAFLFGLELIICGLEKQLKCESGS

SEQ ID NO: 98 - protein, 208 aa, Artificial Sequence
  Sulfonylurea responsive repressor
  VARIANT 67, 105, 123, 138, 146, 153, 181: Xaa = Any Amino Acid
MGSRLDKSKVINSALELLNEVGIEGLTTRKLAQKLGVEQPTLYWHVKNKRALLDALAIEMMDRHATXYCPLEGESWQDFLRNNAKSMRCALLSHRDGAKVCLGTXWTEKHYETAENQLAFLCXQGFSLENALYAMSAXRVFTLGCXLFDQELXVAKEERETPTTASMPPLLRQGWELKDHXGAEPAFLFGLELIICGLEKQLKCESGS

SEQ ID NO: 99 - protein, 208 aa, Artificial Sequence
  Sulfonylurea responsive repressor
  VARIANT 105: Xaa = Any Amino Acid
MGSRLDKSKVINSALELLNEVGIEGLTTRKLAQKLGVEQPTLYWHVKNKRALLDALAIEMMDRHQTHLCPLEGESWQDFLRNTAKSMRCALLSHRDGAKVCLGTXWTEKMYESAENMLAFLCQQGFSLENALYAVSAVRVFTLGCVLFDQELQVAKEERETPTTASMPPLLRQVWELKDHQGAEPAFLFGLELIICGLEKQLKCESGS

SEQ ID NO: 100 - protein, 208 aa, Artificial Sequence
  Sulfonylurea responsive repressor
  VARIANT 164, 165, 168: Xaa = Any Amino Acid
MGSRLDKSKVINSALELLNEVGIEGLTTRKLAQKLGVEQPTLYWHVKNKRALLDALAIEMMDRHQTHMCPLEGESWQDFLRNNAKSMRCALLSHRDGAKVCLGTRWTEKMYESAENMLAFLCQQGFSLENALYAMSAVRVFTLGCVLFDQESQVAKEERETPTXXSMXPLVRQAWELKDHQGAEPAFLFGLELIICGLEKQLKCESGS

SEQ ID NO: 101 - protein, 208 aa, Artificial Sequence
  Sulfonylurea responsive repressor
MGSRLDKSKVINSALELLNEVGIEGLTTRKLAQKLGVEQPTLYWHVKNKRALLDALAIEMMDRHATHICPLEGESWQDFLRNTAKSMRCALLSHRDGAKVCLGTRWTEQHYESAENQLAFLCQQGFSLENALYAVSAVRVFTLGCVLFDQESQVAKEERETPTTASMPPLLRQVWELKDHQGAEPAFLFGLELIICGLEKQLKCESGS

SEQ ID NO: 102 - protein, 208 aa, Artificial Sequence
  Sulfonylurea responsive repressor
  VARIANT 101, 110, 113, 135, 171, 174: Xaa = Any Amino Acid
MGSRLDKSKVINSALELLNEVGIEGLTTRKLAQKLGVEQPTLYWHVKNKRALLDALAIEMMDRHQTHYCPLEGESWQDFLRNTAKSMRCALLSHRDGAKVXLGTRWTEKXYEXAENQLAFLCQQGFSLENALYAXSAVRVFTLGCVLFDQESQVAKEERETPTTASMPPLXRQXWELKDHQGAEPAFLFGLELIICGLEKQLKCESGS

SEQ ID NO: 103 - protein, 208 aa, Artificial Sequence
  Sulfonylurea responsive repressor
  VARIANT 65, 68, 140, 167, 174: Xaa = Any Amino Acid
MGSRLDKSKVINSALELLNEVGIEGLTTRKLAQKLGVEQPTLYWHVKNKRALLDALAIEMMDRHXTHXCPLEGESWQDFLRNTAKSMRCALLSHRDGAKVCLGTRWTEQHYEAAENLLAFLCQQGFSLENALYAMSAVRXFTLGCVLFDQELQVAKEERETPTTASXPPLVRQXWELKDHQGAEPAFLFGLELIICGLEKQLKCESGS

SEQ ID NO: 104 - protein, 208 aa, Artificial Sequence
  Sulfonylurea responsive repressor
MGSRLDKSKVINSALELLNEVGIEGLTTRKLAQKLGVEQPTLYWHVKNKRALLDALAIEMMDRHATHVCPLEGESWQDFLRNNAKSMRCALLSHRDGAKVCLGTRWTEQQYETAENMLAFLCQQGFSLENALYAVSAVRNFTLGCVLFDQESQVAKEERETPTTASMPPLLRQGWELKDHQGAEPAFLFGLELIICGLEKQLKCESGS

SEQ ID NO: 105 - protein, 208 aa, Artificial Sequence
  Sulfonylurea responsive repressor
MGSRLDKSKVINSALELLNEVGIEGLTTRKLAQKLGVEQPTLYWHVKNKRALLDALAIEMMDRHATHYCPLEGESWQDFLRNNAKSMRCALLSHRDGAKVCLGTRWTEQHYETAENMLAFLCQQGFSLENALYAVSAVRNFTLGCVLFDQELQVAKEERETPTTASMPPLVRQAWELKDHQGAEPAFLFGLELIICGLEKQLKCESGS

SEQ ID NO: 106 - protein, 208 aa, Artificial Sequence
  Sulfonylurea responsive repressor
MGSRLDKSKVINSALELLNEVGIEGLTTRKLAQKLGVEQPTLYWHVKNKRALLDALAIEMMDRHQTHFCPLEGESWQDFLRNNAKSMRCALLSHRDGAKVCLGTRWTEQMYETAENMLAFLCQQGFSLENALYAMSAVRVFTLGCVLFDQESQVAKEERETPTTASMPPLVRQGWELKDHQGAEPAFLFGLELIICGLEKQLKCESGS

SEQ ID NO: 107 - protein, 208 aa, Artificial Sequence
  Sulfonylurea responsive repressor
  VARIANT 156, 163, 167: Xaa = Any Amino Acid
MGSRLDKSKVINSALELLNEVGIEGLTTRKLAQKLGVEQPTLYWHVKNKRALLDALAIEMMDRHATDYCPLEGESWQDFLRNNAKSMRCALLSHRDGAKVCLGTRWTEKQYETAENMLAFLCQQGFSLENALYAVSAVRVFTLGCVLFDQESQVAXEERETPXTASXPPLVRQVWELKDHQGAEPAFLFGLELIICGLEKQLKCESGS

SEQ ID NO: 108 - protein, 208 aa, Artificial Sequence
  Sulfonylurea responsive repressor
MGSRLDKSKVINSALELLNEVGIEGLTTRKLAQKLGVEQPTLYWHVKNKRALLDALAIEMMDRHQTHYCPLEGESWQDFLRNNAKSMRCALLSHRDGAKVCLGTRWTEQLYETAENQLAFLCQQGFSLENALYAMSAVRVFTLGCVLFDQESQVAKEERETPTTASMPPLVRQAWELKDHQGAEPAFLFGLELIICGLEKQLKCESGS

SEQ ID NO: 109 - protein, 208 aa, Artificial Sequence
  Sulfonylurea responsive repressor
  VARIANT 134: Xaa = Any Amino Acid
MGSRLDKSKVINSALELLNEVGIEGLTTRKLAQKLGVEQPTLYWHVKNKRALLDALAIEMMDRHQTHVCPLEGESWQDFLRNNAKSMRCALLSHRDGAKVCLGTRWTEQHYEAAENMLAFLCQQGFSLENALYXMSAVRVFTLGCVLFDQELQVAKEERETPTTASMPPLVRQAWELKDHQGAEPAFLFGLELIICGLEKQLKCESGS

SEQ ID NO: 110 - protein, 208 aa, Artificial Sequence
  Sulfonylurea responsive repressor
MGSRLDKSKVINSALELLNEVGIEGLTTRKLAQKLGVEQPTLYWHVKNKRALLDALAIEMMDRHQTHFCPLEGESWQDFLRNNAKSMRCALLSHRDGAKVCLGTRWTEQQYESAENQLAFLCQQGFSLENALYAMSAVRVFTLGCVLFDQESQVAKEERETPTTASMPPLLRQGLELKDHQGAEPAFLFGLELIICGLEKQLKCESGS

SEQ ID NO: 111 - protein, 208 aa, Artificial Sequence
  Sulfonylurea responsive repressor
MGSRLDKSKVINSALELLNEVGIEGLTTRKLAQKLGVEQPTLYWHVKNKRALLDALAIEMMDRHQTHLCPLEGESWQDFLRNNAKSMRCALLSHRDGAKVCLGTRWTEQLYETAENMLAFLCQQGFSLENALYAMSAVRVFTLGCVLFDQESQVAKEERETPTTASMPPLLRQGWELKDHQGAEPAFLFGLELIICGLEKQLKCESGS

SEQ ID NO: 112 - protein, 208 aa, Artificial Sequence
  Sulfonylurea responsive repressor
MGSRLDKSKVINSALELLNEVGIEGLTTRKLAQKLGVEQPTLYWHVKNKRALLDALAIEMMDRHQTHYCPLEGESWQDFLRNTAKSMRCALLSHRDGAKVCLGTRWTEKLYETAENMLAFLCQQGFSLENALYAMSAVRVFTLGCVLFDQESQVAKEERETPTTASMPPLLRQAWELKDHQGAEPAFLFGLELIICGLEKQLKCESGS

SEQ ID NO: 113 - protein, 208 aa, Artificial Sequence
  Sulfonylurea responsive repressor
MGSRLDKSKVINSALELLNEVGIEGLTTRKLAQKLGVEQPTLYWHVKNKRALLDALAIEMMDRHQTHYCPLEGESWQDFLRNNAKSMRCALLSHRDGAKVCLGTRWTEKQYETAENMLAFLCQQGFSLENALYAMSAVRVFTLGCVLFDQELQVAKEERETPTTASMPPLLRQVWELKDHQGAEPAFLFGLELIICGLEKQLKCESGS

SEQ ID NO: 114 - protein, 208 aa, Artificial Sequence
  Sulfonylurea responsive repressor
MGSRLDKSKVINSALELLNEVGIEGLTTRKLAQKLGVEQPTLYWHVKNKRALLDALAIEMMDRHQTHYCPLEGESWQDFLRNTAKSMRCALLSHRDGAKVCLGTRWTEQMYESAENQLAFLCQQGFSLENALYAVSAVRVFTLGCVLFDQELQVAKEERETPTTASMPPLLRQAWELKDHQGAEPAFLFGLELIICGLEKQLKCESGS

SEQ ID NO: 115 - protein, 208 aa, Artificial Sequence
  Sulfonylurea responsive repressor
MGSRLDKSKVINSALELLNEVGIEGLTTRKLAQKLGVEQPTLYWHVKNKRALLDALAIEMMDRHQTHYCPLEGESWQDFLRNTAKSMRCALLSHRDGAKVCLGTRWTEKQYETAENMLAFLCQQGFSLENALYAMSAVRVFTLGCVLFDQESQVAKEERETPTTASMPPLLRQGWELKDHQGAEPAFLFGLELIICGLEKQLKCESGS

SEQ ID NO: 116 - protein, 208 aa, Artificial Sequence; identical to SEQ ID NO: 88
  Sulfonylurea responsive repressor

SEQ ID NO: 117 - protein, 208 aa, Artificial Sequence
  Sulfonylurea responsive repressor
MGSRLDKSKVINSALELLNEVGIEGLTTRKLAQKLGVEQPTLYWHVKNKRALLDALAIEMMDRHQTHYCPLEGESWQDFLRNNAKSMRCALLSHRDGAKVCLGTRWTEKQYESAENMLAFLCQQGFSLENALYAVSAVRVFTLGCVLFDQESQVAKEERETPTTASMPPLLRQAWELKDHQGAEPAFLFGLELIICGLEKQLKCESGS

SEQ ID NO: 118 - protein, 208 aa, Artificial Sequence
  Sulfonylurea responsive repressor
MGSRLDKSKVINSALELLNEVGIEGLTTRKLAQKLGVEQPTLYWHVKNKRALLDALAIEMMDRHQTHLCPLEGESWQDFLRNNAKSMRCALLSHRDGAKVCLGTRWTEQLYESAENQLAFLCQQGFSLENALYAVSAVRVFTLGCVLFDQESQVAKEERETPTTASMPPLLRQAWELKDHQGAEPAFLFGLELIICGLEKQLKCESGS

SEQ ID NO: 119 - protein, 208 aa, Artificial Sequence
  Sulfonylurea responsive repressor
MGSRLDKSKVINSALELLNEVGIEGLTTRKLAQKLGVEQPTLYWHVKNKRALLDALAIEMMDRHATHLCPLEGESWQDFLRNNAKSMRCALLSHRDGAKVCLGTRWTEKQYETAENMLAFLCQQGFSLENALYAVSAVRVFTLGCVLFDQESQVAKEERETPTTASMPPLLRQVWELKDHQGAEPAFLFGLELIICGLEKQLKCESGS

SEQ ID NO: 120 - protein, 208 aa, Artificial Sequence
  Sulfonylurea responsive repressor
  VARIANT 165, 167: Xaa = Any Amino Acid
MGSRLDKSKVINSALELLNEVGIEGLTTRKLAQKLGVEQPTLYWHVKNKRALLDALAIEMMDRHATHFCPLEGESWQDFLRNNAKSMRCALLSHRDGAKVCVGTRWTEQMYEAAENQLAFLCQQGFSLENALYAVSAVRVFTLGCVLFDQELQVAKEERETPTTXSXPPLVRQAWELKDHQGAEPAFLFGLELIICGLEKQLKCESGS

SEQ ID NO: 121 - protein, 208 aa, Artificial Sequence
  Sulfonylurea responsive repressor
MGSRLDKSKVINSALELLNEVGIEGLTTRKLAQKLGVEQPTLYWHVKNKRALLDALAIEMMDRHQTHICPLEGESWQDFLRNNAKSMRCALLSHRDGAKVCVGTRWTEKHYESAENMLAFLCQQGFSLENALYAVSAVRVFTLGCVLFDQESQVAKEERETPTTASMPPLLRQAWELKDHQGAEPAFLFGLELIICGLEKQLKCESGS

SEQ ID NO: 122 - protein, 208 aa, Artificial Sequence
  Sulfonylurea responsive repressor
  VARIANT 101, 117, 140, 152, 175: Xaa = Any Amino Acid
MGSRLDKSKVINSALELLNEVGIEGLTTRKLAQKLGVEQPTLYWHVKNKRALLDALAIEMMDRHATHFCPLEGESWQDFLRNNAKSMRCALLSHRDGAKVXLGTRWTEQLYETAENXLAFLCQQGFSLENALYAMSAVRXFTLGCVLFDQEXQVAKEERETPTTASMPPLLRQVXELKDHQGAEPAFLFGLELIICGLEKQLKCESGS

SEQ ID NO: 123 - protein, 208 aa, Artificial Sequence
  Sulfonylurea responsive repressor
MGSRLDKSKVINSALELLNEVGIEGLTTRKLAQKLGVEQPTLYWHVKNKRALLDALAIEMMDRHATHVCPLEGESWQDFLRNTAKSMRCALLSHRDGAKVCLGTRWTEQHYETAENMLAFLCQQGFSLENALYAMSAVRVFTLGCVLFDQESQVAKEERETPTTASMPPLLRQVWELKDHQGAEPAFLFGLELIICGLEKQLKCESGS

SEQ ID NO: 124 - protein, 208 aa, Artificial Sequence
  Sulfonylurea responsive repressor
  VARIANT 68, 140, 171: Xaa = Any Amino Acid
MGSRLDKSKVINSALELLNEVGIEGLTTRKLAQKLGVEQPTLYWHVKNKRALLDALAIEMMDRHPTHXCPLEGESWQDFLRNTAKSMRCALLSHRDGAKVCLGTRWTEQLYETAENMLAFLCQQGFSLENALYAMSAVRXFTLGCVLFDQEIQVAKEERETPTTASMPPLXRQAWELKDHQGAEPAFLFGLELIICGLEKQLKCESGS

SEQ ID NO: 125 - protein, 208 aa, Artificial Sequence
  Sulfonylurea responsive repressor
  VARIANT 135, 152, 171, 174: Xaa = Any Amino Acid
MGSRLDKSKVINSALELLNEVGIEGLTTRKLAQKLGVEQPTLYWHVKNKRALLDALAIEMMDRHATHYCPLEGESWQDFLRNTAKSMRCALLSHRDGAKVCLGTRWTEKLYETAENMLAFLCQQGFSLENALYAXSAVRVFTLGCVLFDQEXQVAKEERETPTTASMPPLXRQXWELKDHQGAEPAFLFGLELIICGLEKQLKCESGS

SEQ ID NO: 126 - protein, 208 aa, Artificial Sequence
  Sulfonylurea responsive repressor
  VARIANT 151, 164, 168: Xaa = Any Amino Acid
MGSRLDKSKVINSALELLNEVGIEGLTTRKLAQKLGVEQPTLYWHVKNKRALLDALAIEMMDRHATHLCPLEGESWQDFLRNTAKSMRCALLSHRDGAKVCLGTRWTEQLYETAENMLAFLCQQGFSLENALYAVSAVRVFTLGCVLFDQXLQVAKEERETPTXASMXPLVRQGWELKDHQGAEPAFLFGLELIICGLEKQLKCESGS

SEQ ID NO: 127 - protein, 208 aa, Artificial Sequence
  Sulfonylurea responsive repressor
  VARIANT 140, 152: Xaa = Any Amino Acid
MGSRLDKSKVINSALELLNEVGIEGLTTRKLAQKLGVEQPTLYWHVKNKRALLDALAIEMMDRHQTHYCPLEGESWQDFLRNNAKSMRCALLSHRDGAKVWLGTRWTEQLYEAAENLLAFLCQQGFSLENALYAVSAVRXFTLGCVLFDQEXQVAKEERETPTTASMPPLLRQAWELKDHQGAEPAFLFGLELIICGLEKQLKCESGS

SEQ ID NO: 128 - protein, 208 aa, Artificial Sequence
  Sulfonylurea responsive repressor
  VARIANT 167: Xaa = Any Amino Acid
MGSRLDKSKVINSALELLNEVGIEGLTTRKLAQKLGVEQPTLYWHVKNKRALLDALAIEMMDRHQTHYCPLEGESWQDFLRNNAKSMRCALLSNRDGAKVCLGTRWTEKLYEAAENQLAFLCQQGFSLENALYAVSAVRVFTLGCVLFDQELQVAKEERETPTTASXPPLVRQAWELKDHQGAEPAFLFGLELIICGLEKQLKCESGS

SEQ ID NO: 129 - protein, 208 aa, Artificial Sequence
  Sulfonylurea responsive repressor
MGSRLDKSKVINSALELLNEVGIEGLTTRKLAQKLGVEQPTLYWHVKNKRALLDALAIEMMDRHATHYCPLEGESWQDFLRNTAKSMRCALLSHRDGAKVCLGTRWTEQLYETAENQLAFLCQQGFSLENALYAVSAVRVFTLGCVLFDQELQVAKEERETPTTASMPPLLRQAWELKDHQGAEPAFLFGLELIICGLEKQLKCESGS

SEQ ID NO: 130 - protein, 208 aa, Artificial Sequence
  Sulfonylurea responsive repressor
MGSRLDKSKVINSALELLNEVGIEGLTTRKLAQKLGVEQPTLYWHVKNKRALLDALAIEMMDRHQTHYCPLEGESWQDFLRNNAKSMRCALLSHRDGAKVCLGTRWTEKHYEGAENQLAFLCQQGFSLENALYAMSAVRVFTLGCVLFDQESQVAKEERETPTTASMPPLVRQVWELKDHQGAEPAFLFGLELIICGLEKQLKCESGS

SEQ ID NO: 131 - protein, 208 aa, Artificial Sequence
  Sulfonylurea responsive repressor
MGSRLDKSKVINSALELLNEVGIEGLTTRKLAQKLGVEQPTLYWHVKNKRALLDALAIEMMDRHQTHMCPLEGESWQDFLRNNAKSMRCALLSHRDGAKVCLGTRWTEKHYETAENQLAFLCQQGFSLENALYAVSAVRVFTLGCVLFDQELQVAKEERETPTTASMPPLVRQAWELKDHQGAEPAFLFGLELIICGLEKQLKCESGS

SEQ ID NO: 132 - protein, 208 aa, Artificial Sequence
  Sulfonylurea responsive repressor
MGSRLDKSKVINSALELLNEVGIEGLTTRKLAQKLGVEQPTLYWHVKNKRALLDALAIEMMDRHATHLCPLEGESWQDFLRNNAKSMRCALLSHRDGAKVCLGTRWTEQQYETAENMLAFLCQQGFSLENALYAVSAVRNFTLGCVLFDQESQVAKEERETPTTASMPPLLRQAWELKDHQGAEPAFLLGLELIICGLEKQLKCESGS

SEQ ID NO: 133 - protein, 208 aa, Artificial Sequence
  Sulfonylurea responsive repressor
  VARIANT 152: Xaa = Any Amino Acid
MGSRLDKSKVINSALELLNEVGIEGLTTRKLAQKLGVEQPTLYWHVKNKRALLDALAIEMMDRHPTHYCPLEGESWQDFLRNNAKSMRCALLSHRDGAKVCLGTRWTEQQYETAENQLAFLCQQGFSLENALYAMSAVRNFTLGCVLFDQEXQVAKEERETPTTASMPPLLRQAWELKDHQGAEPAFLFGLELIICGLEKQLKCESGS

SEQ ID NO: 134 - protein, 208 aa, Artificial Sequence
  Sulfonylurea responsive repressor
MGSRLDKSKVINSALELLNEVGIEGLTTRKLAQKLGVEQPTLYWHVKNKRALLDALAIEMMDRHQTHFCPLEGESWQDFLRNTAKSMRCALLSHRDGAKVCLGTRWTEQQYETAENMLAFLCQQGFSLENALYAVSAVRVFTLGCVLFDQESQVAKEERETPTTASMPPLARQAWELKDHQGAEPAFLFGLELIICGLEKQLKCESGS

SEQ ID NO: 135 - protein, 208 aa, Artificial Sequence
  Sulfonylurea responsive repressor
MGSRLDKSKVINSALELLNEVGIEGLTTRKLAQKLGVEQPTLYWHVKNKRALLDALAIEMMDRHQTHVCPLEGESWQDFLRNNAKSMRCALLSHRDGAKVCLGTRWTEQMYETAENQLAFLCQQGFSLENALYAVSAVRVFTLGCVLFDQESQVAKEERETPTTASMPPLLRQAWELKDHQGAEPAFLFGLELIICGLEKQLKCESGS

SEQ ID NO: 136 - protein, 208 aa, Artificial Sequence
  Sulfonylurea responsive repressor
MGSRLDKSKVINSALELLNEVGIEGLTTRKLAQKLGVEQPTLYWHVKNKRALLDALAIEMMDRHATHYCPLEGESWQDFLRNTAKSMRCALLSHRDGAKVCLGTRWTEQLYETAENQLAFLCQQGFSLENALYAMSAVRVFTLGCVLFDQESQVAKEERETPTTASMPPLLRQAWELKDHQGAEPAFLFGLELIICGLEKQLKCESGS

SEQ ID NO: 137 - protein, 208 aa, Artificial Sequence
  Sulfonylurea responsive repressor
MGSRLDKSKVINSALELLNEVGIEGLTTRKLAQKLGVEQPTLYWHVKNKRALLDALAIEMMDRHATHYCPLEGESWQDFLRNNAKSMRCALLSHRDGAKVCLGTRWTEQLYETAENMLAFLCQQGFSLENALYAMSAVRVFTLGCVLFDQESQVAKEERETPTTASMPPLVRQGWELKDHQGAEPAFLFGLELIICGLEKQLKCESGS

SEQ ID NO: 138 - protein, 208 aa, Artificial Sequence
  Sulfonylurea responsive repressor
MGSRLDKSKVINSALELLNEVGIEGLTTRKLAQKLGVEQPTLYWHVKNKRALLDALAIEMMDRHQTHYCPLEGESWQDFLRNNAKSMRCALLSHRDGAKVWLGTRWTEKQYESAENMLAFLCQQGFSLENALYAVSAVRVFTLGCVLFDQELQVAKEERETPTTASMPPLVRQAWELKDHQGAEPAFLFGLELIICGLEKQLKCESGS

SEQ ID NO: 139 - protein, 208 aa, Artificial Sequence
  Sulfonylurea responsive repressor
MGSRLDKSKVINSALELLNEVGIEGLTTRKLAQKLGVEQPTLYWHVKNKRALLDALAIEMMDRHQTHMCPLEGESWQDFLRNTAKSMRCALLSHRDGAKVCLGTRWTEQMYEAAENQLAFLCQQGFSLENALYAMSAVRVFTLGCVLFDQESQVAKEERETPTTASMPPLVRQVWELKDHQGAEPAFLFGLELIICGLEKQLKCESGS

SEQ ID NO: 140 - protein, 208 aa, Artificial Sequence
  Sulfonylurea responsive repressor
MGSRLDKSKVINSALELLNEVGIEGLTTRKLAQKLGVEQPTLYWHVKNKRALLDALAIEMMDRHQTHYCPLEGESWQDFLRNTAKSMRCALLSHRDGAKVCLGTRWTEQMYETAENQLAFLCQQGFSLENALYAMSAVRVFTLGCVLFDQESQVAKEERETPTTASMPPLLRQVWELKDHQGAEPAFLFGLELIICGLEKQLKCESGS

SEQ ID NO: 141 - protein, 208 aa, Artificial Sequence
  Sulfonylurea responsive repressor
  VARIANT 109, 113: Xaa = Any Amino Acid
MGSRLDKSKVINSALELLNEVGIEGLTTRKLAQKLGVEQPTLYWHVKNKRALLDALAIEMMDRHQTHICPLEGESWQDFLRNTAKSMRCALLSHRDGAKVCLGTRWTEXQYEXAENMLAFLCQQGFSLENALYAMSAVRVFTLGCVLFDQELQVAKEERETPTTASMPPLVRQVWELKDHQGAEPAFLFGLELIICGLEKQLKCESGS

SEQ ID NO: 142 - protein, 208 aa, Artificial Sequence
  Sulfonylurea responsive repressor
MGSRLDKSKVINSALELLNEVGIEGLTTRKLAQKLGVEQPTLYWHVKNKRALLDALAIEMMDRHQTHMCPLEGESWQDFLRNNAKSMRCALLSHRDGAKVCLGTRWTEQHYEAAENQLAFLCQQGFSLENALYAMSAVRVFTLGCVLFDQESQVAKEERETPTTASMPPLVRQAWELKDHQGAEPAFLFGLELIICGLEKQLKCESGS

SEQ ID NO: 143 - protein, 208 aa, Artificial Sequence
  Sulfonylurea responsive repressor
  VARIANT 135, 171: Xaa = Any Amino Acid
MGSRLDKSKVINSALELLNEVGIEGLTTRKLAQKLGVEQPTLYWHVKNKRALLDALAIEMMDRHATHYCPLEGESWQDFLRNTAKSMRCALLSHRDGAKVCLGTRWTEQHYETAENQLAFLCQQGFSLENALYAXSAVRVFTLGCVLFDQELQVAKEERETPTTASMPPLXRQVWELKDHQGAEPAFLFGLELIICGLEKQLKCESGS

SEQ ID NO: 144 - protein, 208 aa, Artificial Sequence
  Sulfonylurea responsive repressor
  VARIANT 68, 113, 139: Xaa = Any Amino Acid
MGSRLDKSKVINSALELLNEVGIEGLTTRKLAQKLGVEQPTLYWHVKNKRALLDALAIEMMDRHQTHXCPLEGESWQDFLRNTAKSMRCALLSHRDGAKVCLGTRWTEQLYEXAENQLAFLCQQGFSLENALYAMSAVXVFTLGCVLFDQELQVAKEERETPTTASMPPLSRQVWELKDHQGAEPAFLFGLELIICGLEKQLKCESGS

SEQ ID NO: 145 - protein, 208 aa, Artificial Sequence
  Sulfonylurea responsive repressor
MGSRLDKSKVINSALELLNEVGIEGLTTRKLAQKLGVEQPTLYWHVKNKRALLDALAIEMMDRHATHICPLEGESWQDFLRNNAKSMRCALLSHRDGAKVCLGTRWTEQQYEAAENMLAFLCQQGFSLENALYAMSAVRVFTLGCVLFDQELQVAKEERETPTTASMPPLLRQVWELKDHQGAEPAFLFGLELIICGLEKQLKCESGS

SEQ ID NO: 146 - protein, 208 aa, Artificial Sequence
  Sulfonylurea responsive repressor
MGSRLDKSKVINSALELLNEVGIEGLTTRKLAQKLGVEQPTLYWHVKNKRALLDALAIEMMDRHQTHICPLEGESWQDFLRNNAKSMRCALLSHRDGAKVCLGTRWTEQQYETAENQLAFLCQQGFSLENALYAMSAVRVFTLGCVLFDQESQVAKEERETPTTASMPPLVRQGWELKDHQGAEPAFLFGLELIICGLEKQLKCESGS

SEQ ID NO: 147 - protein, 208 aa, Artificial Sequence
  Sulfonylurea responsive repressor
MGSRLDKSKVINSALELLNEVGIEGLTTRKLAQKLGVEQPTLYWHVKNKRALLDALAIEMMDRHQTHVCPLEGESWQDFLRNNAKSMRCALLSHRDGAKVCLGTRWTEQQYESAENMLAFLCQQGFSLENALYAMSAVRVFTLGCVLFDQESQVAKEERETPTTASMPPLLRQVLELKDHQGAEPAFLFGLELIICGLEKQLKCESGS

SEQ ID NO: 148 - protein, 208 aa, Artificial Sequence
  Sulfonylurea responsive repressor
MGSRLDKSKVINSALELLNEVGIEGLTTRKLAQKLGVEQPTLYWHVKNKRALLDALAIEMMDRHATNYCPLEGESWQDFLRNTAKSMRCALLSHRDGAKVCLGTRWTEQQYETAENMLAFLCQQGFSLENALYAVSAVRVFTLGCVLFDQELQVAKEERETPTTASMPPLLRQVWELKDHQGAEPAFLFGLELIICGLEKQLKCESGS

SEQ ID NO: 149 - protein, 208 aa, Artificial Sequence
  Sulfonylurea responsive repressor
MGSRLDKSKVINSALELLNEVGIEGLTTRKLAQKLGVEQPTLYWHVKNKRALLDALAIEMMDRHQTHFCPLEGESWQDFLRNTAKSMRCALLSHRDGAKVWLGTRWTEKQYETAENQLAFLCQQGFSLENALYAVSAVRVFTLGCVLFDQELQVAKEERETPTTASMPPLLRQAWELKDHQGAEPAFLFGLELIICGLEKQLKCESGS

SEQ ID NO: 150 - protein, 208 aa, Artificial Sequence
  Sulfonylurea responsive repressor
  VARIANT 109, 110, 113, 139, 140, 171, 174: Xaa = Any Amino Acid
MGSRLDKSKVINSALELLNEVGIEGLTTRKLAQKLGVEQPTLYWHVKNKRALLDALAIEMMDRHQTHYCPLEGESWQDFLRNTAKSMRCALLSHRDGAKVCLGTRWTEXXYEXAENQLAFLCQQGFSLENALYAMSAVXXFTLGCVLFDQESQVAKEERETPTTASMPPLXRQXWELKDHQGAEPAFLFGLELIICGLEKQLKCESGS

SEQ ID NO: 151 - protein, 208 aa, Artificial Sequence
  Sulfonylurea responsive repressor
MGSRLDKSKVINSALELLNEVGIEGLTTRKLAQKLGVEQPTLYWHVKNKRALLDALAIEMMDRHQTHYCPLEGESWQDFLRNNAKSMRCALLSHRDGAKVCLGTRWTEQLYETAENMLAFLCQQGFSLENALYAMSAVRVFTLGCVLFDQESQVAKEERETPTTASMPPLLRQVWELKDHQGAEPAFLFGLELIICGLEKQLKCESGS

SEQ ID NO: 152 - protein, 208 aa, Artificial Sequence
  Sulfonylurea responsive repressor
MGSRLDKSKVINSALELLNEVGIEGLTTRKLAQKLGVEQPTLYWHVKNKRALLDALAIEMMDRHATHLCPLEGESWQDFLRNTAKSMRCALLSHRDGAKVCLGTRWTEQQYEAAENMLAFLCQQGFSLENALYAMSAVRVFTLGCVLFDQESQVAKEERETPTTASMPPLLRQVWELKDHQGAEPAFLFGLELIICGLEKQLKCESGS

SEQ ID NO: 153 - protein, 208 aa, Artificial Sequence
  Sulfonylurea responsive repressor
MGSRLDKSKVINSALELLNEVGIEGLTTRKLAQKLGVEQPTLYWHVKNKRALLDALAIEMMDRHQTHYCPLEGESWQDFLRNNAKSMRCALLSHRDGAKVCLGTRWTEKHYESAENMLAFLCQQGFSLENALYAMSAVRVFTLGCVLFDQELQVAKEERETPTTASMPPLLRQVWELKDHQGAEPAFLFGLELIICGLEKQLKCESGS

SEQ ID NO: 154 - protein, 208 aa, Artificial Sequence
  Sulfonylurea responsive repressor
MGSRLDKSKVINSALELLNEVGIEGLTTRKLAQKLGVEQPTLYWHVKNKRALLDALAIEMMDRHQTHYCPLEGESWQDFLRNNAKSMRCALLSHRDGAKVCLGTRWTEQHYETAENQLAFLCQQGFSLENALYAMSAVRVFTLGCVLFDQESQVAKEERETPTTASMPPLVRQGWELKDHQGAEPAFLFGLELIICGLEKQLKCESGS

SEQ ID NO: 155 - protein, 208 aa, Artificial Sequence
  Sulfonylurea responsive repressor
MGSRLDKSKVINSALELLNEVGIEGLTTRKLAQKLGVEQPTLYWHVKNKRALLDALAIEMMDRHATHYCPLEGESWQDFLRNNAKSMRCALLSHRDGAKVCLGTRWTEKQYEAAENQLAFLCQQGFSLENALYAVSAVRVFTLGCVLFDQESQVAKEERETPTTASMPPLLRQGWELKDHQGAEPAFLFGLELIICGLEKQLKCESGS

SEQ ID NO: 156 - protein, 208 aa, Artificial Sequence
  Sulfonylurea responsive repressor
MGSRLDKSKVINSALELLNEVGIEGLTTRKLAQKLGVEQPTLYWHVKNKRALLDALAIEMMDRHATHYCPLEGESWQDFLRNNAKSMRCALLSHRDGAKVCLGTRWTEQLYEAAENQLAFLCQQGFSLENALYAMSAVRVFTLGCVLFDQESQVAKEERETPTTASMPPLVRQVWELKDHQGAEPAFLFGLELIICGLEKQLKCESGS

SEQ ID NO: 157 - protein, 208 aa, Artificial Sequence; identical to SEQ ID NO: 17
  Sulfonylurea responsive repressor

SEQ ID NO: 158 - protein, 208 aa, Artificial Sequence
  Sulfonylurea responsive repressor
MGSRLDKSKVINSALELLNEVGIEGLTTRKLAQKLGVEQPTLYWHVKNKRALLDALAIEMMDRHQTHYCPLEGESWQDFLRNNAKSMRCALLSHRDGAKVCLGTRWTEKHYETAENMLAFLCQQGFSLENALYAVSAVRVFTLGCVLFDQELQVAKEERETPTTASMPPLLRQVWELKDHQGAEPAFLFGLELIICGLEKQLKCESGS

SEQ ID NO: 159 - protein, 208 aa, Artificial Sequence
  Sulfonylurea responsive repressor
  VARIANT 65, 110, 113, 135, 171: Xaa = Any Amino Acid
MGSRLDKSKVINSALELLNEVGIEGLTTRKLAQKLGVEQPTLYWHVKNKRALLDALAIEMMDRHXTHYCPLEGESWQDFLRNTAKSMRCALLSHRDGAKVWLGTRWTEQXYEXAENLLAFLCQQGFSLENALYAXSAVRNFTLGCVLFDQESQVAKEERETPTTASMPPLXRQGWELKDHQGAEPAFLFGLELIICGLEKQLKCESGS

SEQ ID NO: 160 - protein, 208 aa, Artificial Sequence
  Sulfonylurea responsive repressor
MGSRLDKSKVINSALELLNEVGIEGLTTRKLAQKLGVEQPTLYWHVKNKRALLDALAIEMMDRHQTHICPLEGESWQDFLRNTAKSMRCALLSHRDGAKVCLGTRWTEKHYEAAENMLAFLCQQGFSLENALYAVSAVRVFTLGCVLFDQESQVAKEERETPTTASMPPLVRQVWELKDHQGAEPAFLFGLELIICGLEKQLKCESGS

SEQ ID NO: 161 - protein, 208 aa, Artificial Sequence
  Sulfonylurea responsive repressor
MGSRLDKSKVINSALELLNEVGIEGLTTRKLAQKLGVEQPTLYWHVKNKRALLDALAIEMMDRHQTHYCPLEGESWQDFLRNNAKSMRCALLSHRDGAKVCLGTRWTEQLYESAENQLAFLCQQGFSLENALYAMSAVRVFTLGCVLFDQELQVAKEERETPTTASMPPLLRQGWELKDHQGAEPAFLFGLELIICGLEKQLKCESGS

SEQ ID NO: 162 - protein, 208 aa, Artificial Sequence
  Sulfonylurea responsive repressor
MGSRLDKSKVINSALELLNEVGIEGLTTRKLAQKLGVEQPTLYWHVKNKRALLDALAIEMMDRHATHICPLEGESWQDFLRNNAKSMRCALLSHRDGAKVCLGTRWTEQQYEAAENQLAFLCQQGFSLENALYAVSAVRVFTLGCVLFDQELQVAKEERETPTTASMPPLLRQAWELKDHQGAEPAFLFGLELIICGLEKQLKCESGS

SEQ ID NO: 163 - protein, 208 aa, Artificial Sequence
  Sulfonylurea responsive repressor
MGSRLDKSKVINSALELLNEVGIEGLTTRKLAQKLGVEQPTLYWHVKNKRALLDALAIEMMDRHATHYCPLEGESWQDFLRNNAKSMRCALLSHRDGAKVCLGTRWTEKQYETAENQLAFLCQQGFSLENALYAVSAVRVFTLGCVLFDQELQVAKEERETPTTASMPPLLRQVWELKDHQGAEPAFLFGLELIICGLEKQLKCESGS

SEQ ID NO: 164 - protein, 208 aa, Artificial Sequence
  Sulfonylurea responsive repressor
MGSRLDKSKVINSALELLNEVGIEGLTTRKLAQKLGVEQPTLYWHVKNKRALLDALAIEMMDRHATHYCPLEGESWQDFLRNNAKSMRCALLSHRDGAKVCLGTRWTEKHYETAENQLAFLCQQGFSLENALYAMSAVRVFTLGCVLFDQESQVAKEERETPTTASMPPLLRQVWELKDHQGAEPAFLFGLELIICGLEKQLKCESGS

SEQ ID NO: 165 - protein, 208 aa, Artificial Sequence
  Sulfonylurea responsive repressor
  VARIANT 110: Xaa = Any Amino Acid
MGSRLDKSKVINSALELLNEVGIEGLTTRKLAQKLGVEQPTLYWHVKNKRALLDALAIEMMDRHQTHYCPLEGESWQDFLRNNAKSMRCALLSHRDGAKVWLGTRWTEQXYEAAENMLAFLCQQGFSLENALYAVSAVGVFTLGCVLFDQELQVAKEERETPTTASMPPLARQVLELKDHQGAEPAFLFGLELIICGLEKQLKCESGS

SEQ ID NO: 166 - protein, 208 aa, Artificial Sequence
  Sulfonylurea responsive repressor
MGSRLDKSKVINSALELLNEVGIEGLTTRKLAQKLGVEQPTLYWHVKNKRALLDALAIEMMDRHATHYCPLEGESWQDFLRNNAKSMRCALLSHRDGAKVCLGTRWTEKLYEAAENMLAFLCQQGFSLENALYAVSAVRVFTLGCVLFDQESQVAKEERETPTTASMPPLLRQVWELKDHQGAEPAFLFGLELIICGLEKQLKCESGS

SEQ ID NO: 167 - protein, 208 aa, Artificial Sequence
  Sulfonylurea responsive repressor
MGSRLDKSKVINSALELLNEVGIEGLTTRKLAQKLGVEQPTLYWHVKNKRALLDALAIEMMDRHATHMCPLEGESWQDFLRNNAKSMRCALLSHRDGAKVWLGTRWTEQQYETAENMLAFLCQQGFSLENALYAVSAVRVFTLGCVLFDQELQVAKEERETPTTASMPPLLRQVWELKDHQGAEPAFLFGLELIICGLEKQLKCESGS

SEQ ID NO: 168 - protein, 208 aa, Artificial Sequence
  Sulfonylurea responsive repressor
MGSRLDKSKVINSALELLNEVGIEGLTTRKLAQKLGVEQPTLYWHVKNKRALLDALAIEMMDRHQTHYCPLEGESWQDFLRNNAKSMRCALLSHRDGAKVCLGTRWTEKQYETAENQLAFLCQQGFSLENALYAMSAVRNFTLGCVLFDQESQVAKEERETPTTASMPPLLRQAWELKDHQGAEPAFLFGLELIICGLEKQLKCESGS

SEQ ID NO: 169 - protein, 208 aa, Artificial Sequence
  Sulfonylurea responsive repressor
MGSRLDKSKVINSALELLNEVGIEGLTTRKLAQKLGVEQPTLYWHVKNKRALLDALAIEMMDRHQTHYCPLEGESWQDFLRNNAKSMRCALLSHRDGAKVCLGTRWTEQQYETAENQLAFLCQQGFSLENALYAVSAVRVFTLGCVLFDQELQVAKEERETPTTASMPPLLRQGWELKDHQGAEPAFLFGLELIICGLEKQLKCESGS

SEQ ID NO: 170 - protein, 208 aa, Artificial Sequence
  Sulfonylurea responsive repressor
MGSRLDKSKVINSALELLNEVGIEGLTTRKLAQKLGVEQPTLYWHVKNKRALLDALAIEMMDRHQTHICPLEGESWQDFLRNNAKSMRCALLSHRDGAKVCLGTRWTEKLYETAENQLAFLCQQGFSLENALYAMSAVRVFTLGCVLFDQELQVAKEERETPTTASMPPLVRQVWELKDHQGAEPAFLFGLELIICGLEKQLKCESGS

SEQ ID NO: 171 - protein, 208 aa, Artificial Sequence
  Sulfonylurea responsive repressor
MGSRLDKSKVINSALELLNEVGIEGLTTRKLAQKLGVEQPTLYWHVKNKRALLDALAIEMMDRHQTHICPLEGESWQDFLRNNAKSMRCALLSHRDGAKVCLGTRWTEKQYESAENMLAFLCQQGFSLENALYAVSAVRVFTLGCVLFDQELQVAKEERETPTTASMPPLVRQVWELKDHQGAEPAFLFGLELIICGLEKQLKCESGS

SEQ ID NO: 172 - protein, 208 aa, Artificial Sequence
  Sulfonylurea responsive repressor
MGSRLDKSKVINSALELLNEVGIEGLTTRKLAQKLGVEQPTLYWHVKNKRALLDALAIEMMDRHATHLCPLEGESWQDFLRNNAKSMRCALLSHRDGAKVCLGTRWTEKQYEAAENQLAFLCQQGFSLENALYAVSAVRVFTLGCVLFDQESQVAKEERETPTTASMPPLLRQVWELKDHQGAEPAFLFGLELIICGLEKQLKCESGS

SEQ ID NO: 173 - protein, 208 aa, Artificial Sequence
  Sulfonylurea responsive repressor
MGSRLDKSKVINSALELLNEVGIEGLTTRKLAQKLGVEQPTLYWHVKNKRALLDALAIEMMDRHATHLCPLEGESWQDFLRNNAKSMRCALLSHRDGAKVCLGTRWTEQLYETAENMLAFLCQQGFSLENALYAVSAVRNFTLGCVLFDQESQVAKEERETPTTASMPPLLRQVWELKDHQGSEPAFLFGLELIICGLEKQLKCESGS

SEQ ID NO: 174 - protein, 208 aa, Artificial Sequence
  Sulfonylurea responsive repressor
MGSRLDKSKVINSALELLNEVGIEGLTTRKLAQKLGVEQPTLYWHVKNKRALLDALAIEMMDRHQTHICPLEGESWQDFLRNNAKSMRCALLSHRDGAKVCLGTRWTEKQYETAENMLAFLCQQGFSLENALYAVSAVRVFTLGCVLFDQELQVAKEERETPTTASMPPLVRQAWELKDHQGAEPAFLFGLELIICGLEKQLKCESGS

SEQ ID NO: 175 - protein, 208 aa, Artificial Sequence
  Sulfonylurea responsive repressor
MGSRLDKSKVINSALELLNEVGIEGLTTRKLAQKLGVEQPTLYWHVKNKRALLDALAIEMMDRHQTHMCPLEGESWQDFLRNNAKSMRCALLSHRDGAKVCLGTRWTEQQYEAAENMLAFLCQQGFSLENALYAMSAVRNFTLGCVLFDQESQVAKEERETPTTASMPPLLRQAWELKDHQGAEPAFLFGLELIICGLEKQLKCESGS

SEQ ID NO: 176 - protein, 208 aa, Artificial Sequence
  Sulfonylurea responsive repressor
MGSRLDKSKVINSALELLNEVGIEGLTTRKLAQKLGVEQPTLYWHVKNKRALLDALAIEMMDRHATHYCPLEGESWQDFLRNNAKSMRCALLSHRDGAKVCLGTRWTEKQYETAENQLAFLCQQGFSLENALYAMSAVRVFTLGCVLFDQELQVAKEERETPTTASMPPLVRQAWELKDHQGAEPAFLFGLELIICGLEKQLKCESGS

SEQ ID NO: 177 - protein, 208 aa, Artificial Sequence
  Sulfonylurea responsive repressor
MGSRLDKSKVINSALELLNEVGIEGLTTRKLAQKLGVEQPTLYWHVKNKRALLDALAIEMMDRHQTHYCPLEGESWQDFLRNTAKSMRCALLSHRDGAKVCLGTRWTEKQYETAENMLAFLCQQGFSLENALYAVSAVRVFTLGCVLFDQESQVAKEERETPTTASMPPLLRQGLELKDHQGAEPAFLFGLELIICGLEKQLKCESGS

SEQ ID NO: 178 - protein, 208 aa, Artificial Sequence
  Sulfonylurea responsive repressor
  VARIANT 65: Xaa = Any Amino Acid
MGSRLDKSKVINSALELLNEVGIEGLTTRKLAQKLGVEQPTLYWHVKNKRALLDALAIEMMDRHXTHYCPLEGESWQDFLRNNAKSMRCALLSHRDGAKVCLGTRWTEKHYETAENMLAFLCQQGFSLENALYAMSAVRNFTLGGVLFDQESQVAKEERETPTTASMPPLARQVWELKDHQGAEPAFLFGLELIICGLEKQLKCESGS

SEQ ID NO: 179 - protein, 208 aa, Artificial Sequence
  Sulfonylurea responsive repressor
MGSRLDKSKVINSALELLNEVGIEGLTTRKLAQKLGVEQPTLYWHVKNKRALLDALAIEMMDRHQTHICPLEGESWQDFLRNNAKSMRCALLSHRDGAKVCLGTRWTEKMYETAENQLAFLCQQGFSLENALYAMSAVRVFTLGCVLFDQELQVAKEERETPTTASMPPLLRQAWELKDHQGAEPAFLFGLELIICGLEKQLKCESGS

SEQ ID NO: 180 - protein, 208 aa, Artificial Sequence
  Sulfonylurea responsive repressor
MGSRLDKSKVINSALELLNEVGIEGLTTRKLAQKLGVEQPTLYWHVKNKRALLDALAIEMMDRHQTHYCPLEGESWQDFLRNTAKSMRCALLSHRDGAKVCLGTRWTEQQYETAENMLAFLCQQGFSLENALYAVSAVRVFTLGCVLFDQESQVAKEERETPTTASMPPLLRQAWELKDHQGAEPAFLFGLELIICGLEKQLKCESGS

SEQ ID NO: 181 - protein, 208 aa, Artificial Sequence
  Sulfonylurea responsive repressor
MGSRLDKSKVINSALELLNEVGIEGLTTRKLAQKLGVEQPTLYWHVKNKRALLDALAIEMMDRHATHYCPLEGESWQDFLRNNAKSMRCALLSHRDGAKVCLGTRWTEQHYETAENQLAFLCQQGFSLENALYAVSAVRVFTLGCVLFDQESQVAKEERETPTTASMPPLLRQVWELKDHQGAEPAFLFGLELIICGLEKQLKCESGS

SEQ ID NO: 182 - protein, 208 aa, Artificial Sequence
  Sulfonylurea responsive repressor
MGSRLDKSKVINSALELLNEVGIEGLTTRKLAQKLGVEQPTLYWHVKNKRALLDALAIEMMDRHATHLCPLEGESWQDFLRNNAKSMRCALLSHRDGAKVCLGTRWTEKQYETAENQLAFLCQQGFSLENALYAVSAVRVFTLGCVLFDQESQVAKEERETPTTASMPPLLRQVWELKDHQGAEPAFLFGLELIICGLEKQLKCESGS

SEQ ID NO: 183 - protein, 208 aa, Artificial Sequence
  Sulfonylurea responsive repressor
MGSRLDKSKVINSALELLNEVGIEGLTTRKLAQKLGVEQPTLYWHVKNKRALLDALAIEMMDRHQTHYCPLEGESWQDFLRNNAKSMRCALLSHRDGAKVCLGTRWTEQQYETAENMLAFLCQQGFSLENALYAMSAVRVFTLGCVLFDQESQVAKEERETPTTASMPPLLRQALELKDHQGAEPAFLFGLELIICGLEKQLKCESGS

SEQ ID NO: 184 - protein, 208 aa, Artificial Sequence
  Sulfonylurea responsive repressor
MGSRLDKSKVINSALELLNEVGIEGLTTRKLAQKLGVEQPTLYWHVKNKRALLDALAIEMMDRHQTHFCPLEGESWQDFLRNTAKSMRCALLSHRDGAKVCLGTRWTEQLYEAAENMLAFLCQQGFSLENALYAVSAVRVFTLGCVLFDQESQVAKEERETPTTASMPPLLRQGWELKDHQGAEPAFLFGLELIICGLEKQLKCESGS

SEQ ID NO: 185 - protein, 208 aa, Artificial Sequence
  Sulfonylurea responsive repressor
MGSRLDKSKVINSALELLNEVGIEGLTTRKLAQKLGVEQPTLYWHVKNKRALLDALAIEMMDRHATHLCPLEGESWQDFLRNNAKSMRCALLSHRDGAKVCLGTRWTEQLYETAENQLAFLCQQGFSLENALYAVSAVRVFTLGCVLFDQESQVAKEERETPTTASMPPLLRQVWELKDHQGAEPAFLFGLELIICGLEKQLKCESGS

SEQ ID NO: 186 - protein, 208 aa, Artificial Sequence
  Sulfonylurea responsive repressor
MGSRLDKSKVINSALELLNEVGIEGLTTRKLAQKLGVEQPTLYWHVKNKRALLDALAIEMMDRHQTHYCPLEGESWQDFLRNNAKSMRCALLSHRDGAKVCLGTRWTEQMYEGAENMLAFLCQQGFSLENALYAVSAVRNFTLGCVLFDQESQVAKEERETPTTASMPPLLRQAWELKDHQGAEPAFLFGLELIICGLEKQLKCESGS

SEQ ID NO: 187 - protein, 208 aa, Artificial Sequence
  Sulfonylurea responsive repressor
MGSRLDKSKVINSALELLNEVGIEGLTTRKLAQKLGVEQPTLYWHVKNKRALLDALAIEMMDRHATHYCPLEGESWQDFLRNNAKSMRCALLSHRDGAKVCLGTRWTEQQYETAENQLAFLCQQGFSLENALYAMSAVRVFTLGCVLFDQESQVAKEERETPTSASMPPLVRQVWELKDHQGAEPAFLFGLELIICGLEKQLKCESGS

SEQ ID NO: 188 - protein, 208 aa, Artificial Sequence
  Sulfonylurea responsive repressor
MGSRLDKSKVINSALELLNEVGIEGLTTRKLAQKLGVEQPTLYWHVKNKRALLDALAIEMMDRHQTHYCPLEGESWQDFLRNTAKSMRCALLSHRDGAKVCLGTRWTEKQYEAAENMLAFLCQQGFSLENALYAMSAVRVFTLGCVLFDQESQVAKEERETPTTASMPPLLRQAWELKDHQGAEPAFLFGLELIICGLEKQLKCESGS

SEQ ID NO: 189 - protein, 208 aa, Artificial Sequence
  Sulfonylurea responsive repressor
MGSRLDKSKVINSALELLNEVGIEGLTTRKLAQKLGVEQPTLYWHVKNKRALLDALAIEMMDRHQTHLCPLEGESWQDFLRNNAKSMRCALLSHRDGAKVCLGTRWTEQLYEAAENMLAFLCQQGFSLENALYAVSAVRVFTLGCVLFDQESQVAKEERETPTTASMPPLVRQGWELKDHQGAEPAFLFGLELIICGLEKQLKCESGS

SEQ ID NO: 190 - protein, 208 aa, Artificial Sequence
  Sulfonylurea responsive repressor
MGSRLDKSKVINSALELLNEVGIEGLTTRKLAQKLGVEQPTLYWHVKNKRALLDALAIEMMDRHQTHYCPLEGESWQDFLRNTAKSMRCALLSHRDGAKVCLGTRWTEQLYETAENQLAFLCQQGFSLENALYAMSAVRVFTLGCVLFDQESQVAKEERETPTTASMPPLLRQGWELKDHQGAEPAFLFGLELIICGLEKQLKCESGS

SEQ ID NO: 191 - protein, 208 aa, Artificial Sequence
  Sulfonylurea responsive repressor
MGSRLDKSKVINSALELLNEVGIEGLTTRKLAQKLGVEQPTLYWHVKNKRALLDALAIEMMDRHQTHYCPLEGESWQDFLRNTAKSMRCALLSHRDGAKVCLGTRWTEQHYEAAENMLAFLCQQGFSLENALYAMSAVRVFTLGCVLFDQESQVAKEERETPTTASMPPLLRQAWELKDHQGAEPAFLLGLELIICGLEKQLKCESGS

SEQ ID NO: 192 - protein, 208 aa, Artificial Sequence
  Sulfonylurea responsive repressor
MGSRLDKSKVINSALELLNEVGIEGLTTRKLAQKLGVEQPTLYWHVKNKRALLDALAIEMMDRHQTHMCPLEGESWQDFLRNNAKSMRCALLSHRDGAKVCLGTRWTEKQYEGAENQLAFLCQQGFSLENALYAVSAVRVFTLGCVLFDQESQVAKEERETPTTASMPPLVRQVWELKDHQGAEPAFLFGLELIICGLEKQLKCESGS

SEQ ID NO: 193 - protein, 208 aa, Artificial Sequence
  Sulfonylurea responsive repressor
MGSRLDKSKVINSALELLNEVGIEGLTTRKLAQKLGVEQPTLYWHVKNKRALLDALAIEMMDRHQTHICPLEGESWQDFLRNNAKSMRCALLSHRDGAKVCLGTRWTEQQYEGAENQLAFLCQQGFSLENALYAMSAVRVFTLGCVLFDQESQVAKEERETPTTASMPPLLRQGWELKDHQGAEPAFLFGLELIICGLEKQLKCESGS

SEQ ID NO: 194 - protein, 208 aa, Artificial Sequence
  Sulfonylurea responsive repressor
MGSRLDKSKVINSALELLNEVGIEGLTTRKLAQKLGVEQPTLYWHVKNKRALLDALAIEMMDRHATHMCPLEGESWQDFLRNNAKSMRCALLSHRDGAKVCLGTRWTEQHYETAENQLAFLCQQGFSLENALYAVSAVRVFTLGCVLFDQESQVAKEERETPTTASMPPLLRQGWELKDHQGAEPAFLFGLELIICGLEKQLKCESGS

SEQ ID NO: 195 - protein, 208 aa, Artificial Sequence
  Sulfonylurea responsive repressor
MGSRLDKSKVINSALELLNEVGIEGLTTRKLAQKLGVEQPTLYWHVKNKRALLDALAIEMMDRHATHICPLEGESWQDFLRNNAKSMRCALLSHRDGAKVCLGTRWTEQQYETAENMLAFLCQQGFSLENALYAVSAVRVFTLGCVLFDQESQVAKEERETPTTASMPPLVRQALELKDHQGAEPAFLFGLELIICGLEKQLKCESGS

SEQ ID NO: 196 - protein, 208 aa, Artificial Sequence
  Sulfonylurea responsive repressor
MGSRLDKSKVINSALELLNEVGIEGLTTRKLAQKLGVEQPTLYWHVKNKRALLDALAIEMMDRHATHFCPLEGESWQDFLRNNAKSMRCALLSHRDGAKVWLGTRWTEQQYETAENMLAFLCQQGFSLENALYAVSAVRVFTLGCVLFDQERQVAKEERETPTTASMPPLLRQVWELKDHQGAEPAFLFGLELIICGLEKQLKCESGS

SEQ ID NO: 197 - protein, 208 aa, Artificial Sequence
  Sulfonylurea responsive repressor
MGSRLDKSKVINSALELLNEVGIEGLTTRKLAQKLGVEQPTLYWHVKNKRALLDALAIEMMDRHQTHFCPLEGESWQDFLRNNAKSMRCALLSHRDGAKVCLGTRWTEQQYEAAENQLAFLCQQGFSLENALYAMSAVRNFTLGCVLFDQELQVAKEERETPTTASMPPLLRQVWELKDHQGAEPAFLFGLELIICGLEKQLKCESGS

SEQ ID NO: 198 - protein, 208 aa, Artificial Sequence
  Sulfonylurea responsive repressor
MGSRLDKSKVINSALELLNEVGIEGLTTRKLAQKLGVEQPTLYWHVKNKRALLDALAIEMMDRHQTHVCPLEGESWQDFLRNNAKSMRCALLSHRDGAKVCLGTRWTEQMYETAENMLAFLCQQGFSLENALYAMSAVRVFTLGCVLFDQELQVAKEERETPTTASMPPLLRQAWELKDHQGAEPAFLFGLELIICGLEKQLKCESGS

SEQ ID NO: 199 - protein, 208 aa, Artificial Sequence
  Sulfonylurea responsive repressor
  VARIANT 146, 201: Xaa = Any Amino Acid
MGSRLDKSKVINSALELLNEVGIEGLTTRKLAQKLGVEQPTLYWHVKNKRALLDALAIEMMDRHQTHYCPLEGESWQDFLRNNAKSMRCALLSHRDGAKVCLGTRWTEQHYETAENQLAFLCQQGFSLENALYAMSAVRVFTLGCXLFDQESQVAKEERETPTTASMPPLVRQVWELKDHQGAEPAFLFGLELIICGLEKXLKCESGS

SEQ ID NO: 200 - protein, 208 aa, Artificial Sequence
  Sulfonylurea responsive repressor
MGSRLDKSKVINSALELLNEVGIEGLTTRKLAQKLGVEQPTLYWHVKNKRALLDALAIEMMDRHQTHYCPLEGESWQDFLRNTAKSMRCALLSHRDGAKVCLGTRWTEQHYEGAENMLAFLCQQGFSLENALYAVSAVRVFTLGCVLFDQELQVAKEERETPTTASMPPLVRQGWELKDHQGAEPAFLFGLELIICGLEKQLKCESGS

SEQ ID NO: 201 - protein, 208 aa, Artificial Sequence
  Sulfonylurea responsive repressor
MGSRLDKSKVINSALELLNEVGIEGLTTRKLAQKLGVEQPTLYWHVKNKRALLDALAIEMMDRHQTHVCPLEGESWQDFLRNNAKSMRCALLSHRDGAKVCLGTRWTEQQYEAAENQLAFLCQQGFSLENALYAMSAVRVFTLGCVLFDQELQVAKEERETPTTASMPPLLRQVWELKDHQGAEPAFLFGLELIICGLEKQLKCESGS

SEQ ID NO: 202 - protein, 208 aa, Artificial Sequence
  Sulfonylurea responsive repressor
MGSRLDKSKVINSALELLNEVGIEGLTTRKLAQKLGVEQPTLYWHVKNKRALLDALAIEMMDRHATHLCPLEGESWQDFLRNTAKSMRCALLSHRDGAKVCLGTRWTEQQYESAENMLAFLCQQGFSLENALYAMSAVRVFTLGCVLFDQESQVAKEERETPTTASMPPLLRQAWELKDHQGAEPAFLFGLELIICGLEKQLKCESGS

SEQ ID NO: 203 - protein, 208 aa, Artificial Sequence
  Sulfonylurea responsive repressor
MGSRLDKSKVINSALELLNEVGIEGLTTRKLAQKLGVEQPTLYWHVKNKRALLDALAIEMMDRHQTHYCPLEGESWQDFLRNTAKSMRCALLSHRDGAKVCLGTRWTEQQYESAENQLAFLCQQGFSLENALYAVSAVRVFTLGCVLFDQELQVAKEERETPTTASMPPLLRQVWELKDHQGAEPAFLFGLELIICGLEKQLKCESGS

SEQ ID NO: 204 - protein, 208 aa, Artificial Sequence
  Sulfonylurea responsive repressor
MGSRLDKSKVINSALELLNEVGIEGLTTRKLAQKLGVEQPTLYWHVKNKRALLDALAIEMMDRHATHVCPLEGESWQDFLRNTAKSMRCALLSHRDGAKVCLGTRWTEQQYETAENMLAFLCQQGFSLENALYAMSAVRVFTLGCVLFDQESQVAKEERETPTTASMPPLLRQVWELKDHQGAEPAFLFGLELIICGLEKQLKCESGS

SEQ ID NO: 205 - protein, 208 aa, Artificial Sequence
  Sulfonylurea responsive repressor
MGSRLDKSKVINSALELLNEVGIEGLTTRKLAQKLGVEQPTLYWHVKNKRALLDALAIEMLDRHATHYCPLEGESWQDFLRNNAKSMRCALLSHRDGAKVCLGTGFTEKQYETAENSLAFLCQQGFSLEHAMYAMQAAGIYTLGCVLLDQELQVAKEERETPTTDSMPPLVRQVLELKDHQGAEPAFLFGLELIICGLEKQLKCESGS

SEQ ID NO: 206 - protein, 208 aa, Artificial Sequence
  Sulfonylurea responsive repressor
MGSRLDKSKAINSALELLNEVGIEGLTTRKLAQKLGVEQPTLYWHVKNKRALLDAMAIEMLDRHATHYCPLEGESWQDFLRNNAKSMRCALLSHRDGAKVCLGTGFTEQQYEAAENSMAFLCQQGFSLEHALYAMQAAGIFTLGCVLLDQELQVAKEERETPTTDSMPPLVRQVLELKDHQGAEPAFLFGLELIICGLEKQLKCESGS

SEQ ID NO: 207 - protein, 208 aa, Artificial Sequence
  Sulfonylurea responsive repressor
MGSRLDKSKVINSALELLNEVGIEGLTTRKLAQKLGVEQPTLYWHVKNKRALLDALAIEMLDRHATHYCPLEGESWQDFLRNNAKSMRCALLSHRDGAKVCLGTGFTEQMYEAAENSMAFLCQQGFSLEHAMYAMQAVGIYTLGCVLLDQELQVAKEERETPTTDSMPPLVRQVLELKDHQGAEPAFLFGLELIICGLEIQLKCESGS

SEQ ID NO: 208 - protein, 208 aa, Artificial Sequence
  Sulfonylurea responsive repressor
  VARIANT 10: Xaa = Any Amino Acid
MGSRLDKSKXINSALELLNEVGIEGLTTRKLAQKLGVEQPTLYWHVKNKRALLDAMAIEMLDRHATHYCPLEGESWQDFLRNNAKSMRCALLSHRDGAKVCLGTGFTEQQYETAENSLAFLCQQGFSLENALYAMQAVGIYTLGCVLLDQELQVAKEERETPTTDSMPPLVRQVLELKDHQGAEPAFLFGLELIICGLEKQLKCESGS

SEQ ID NO: 209 - protein, 208 aa, Artificial Sequence
  Sulfonylurea responsive repressor
  VARIANT 9: Xaa = Any Amino Acid
MGSRLDKSXPINSALELLNEVGIEGLTTRKLAQKLGVEQPTLYWHVKNKRALLDALAIEMLDRHATHYCPLEGESWQDFLRNNAKSMRCALLSHRDGAKVCLGTGFTEQQYESAENSMAFLCQQGFSLEHALYAMQAVGIFTLGCVLLDQELQVAKEERETPTTDSMPPLLRQALELKDHQGAEPAFLFGLELIICGLEKQLKCESGS

SEQ ID NO: 210 - protein, 208 aa, Artificial Sequence
  Sulfonylurea responsive repressor
MGSRLDKSKVINSALELLNEVGIEGLTTRKLAQKLGVEQPTLYWHVKNKRALLDAMAIEMLDRHATHICPLEGESWQDFLRNNAKSMRCALLSHRDGAKVCLGTGFTEQQYESAENSMAFLCQQGFSLENAMYAMQAVGIFTLGCVLLDQELQVAKEERETPTTDSMPPLVRQVLELKDHQGAEPAFLFGLELIICGLEKQLKCESGS

SEQ ID NO: 211 - protein, 208 aa, Artificial Sequence
  Sulfonylurea responsive repressor
MGSRLDKSKVINSALELLNEVGIEGLTTRKLAQKLGVEQPTLYWHVKNKRALLDAMAIEMLDRHATHVCPLEGESWQDFLRNNAKSMRCALLSHRDGAKVCLGTGFTEQQYETAENSMAFLCQQGFSLENAMYAMQAVGIFTLGCVLLDQELQVAKEERETPTTDSMPPLVRQALELKDHQGAEPAFLFGLELIICGLEKQLKCESGS

SEQ ID NO: 212 - protein, 208 aa, Artificial Sequence
  Sulfonylurea responsive repressor
MGSRLDKSKVINSALELLNEVGIEGLTTRKLAQKLGVEQPTLYWHVKNKRALLDAMAIEMLDRHATHYCPLEGESWQDFLRNNAKSMRCALLSHRDGAKVCLGTGFTEQMYETAENSMAFLCQQGFSLEHALYAMQAVGIYTVGCVLLDQELQVAKEERETPTTDSMPPLVRQGLELKDHQGAEPAFLFGLELIICGLEKQLKCESGS

SEQ ID NO: 213 - protein, 208 aa, Artificial Sequence
  Sulfonylurea responsive repressor
  VARIANT 110: Xaa = Any Amino Acid
MGSRLDKSKAINSALELLNEVGIEGLTTRKLAQKLGVEQPTLYWHVKNKRALLDAMAIEMLDRHATHYCPLEGESWQDFLRNNAKSMRCALLSHRDGAKVCLGTGFTEQXYEAAENSMAFLCQQGFSLENAMYAMQAVGIYTLGCVLLDQELQVAKEERETPTTDSMPPLVRQVLELKDHQGAEPAFLFGLELIICGLEKQLKCESGS

SEQ ID NO: 214 - protein, 208 aa, Artificial Sequence
  Sulfonylurea responsive repressor
  VARIANT 56, 110, 138, 139: Xaa = Any Amino Acid
MGSRLDKSKVINSALELLNEVGIEGLTTRKLAQKLGVEQPTLYWHVKNKRALLDAXAIEMLDRHATHYCPLEGESWQDFLRNNAKSMRCALLSHRDGAKVCLGTGFTEQXYETAENSLAFLCQQGFSLENAMYAMQAXXIYTLGCVLLDQELQVAKEERETPTTDSMPPLVRQALELKDHQGAEPAFLFGLELIICGLEKQLKCESGS

SEQ ID NO: 215 - protein, 208 aa, Artificial Sequence
  Sulfonylurea responsive repressor
MGSRLDKSKVINSALELLNEVGIEGLTTRKLAQKLGVEQPTLYWHVKNKRALLDAMAIEMLDRHATHYGPLEGESWQDFLRNNAKSMRCALLSHRDGAKVCLGTGFTEQQYETAENSMAFLCQQGFSLENAMYAMQAVCIYTLGCVLLDQELQVAKEERETPTTDSMPPLVRQVLELKDHQGAEPAFLFGLELIICGLEKQLKCESGS

SEQ ID NO: 216 - protein, 208 aa, Artificial Sequence
  Sulfonylurea responsive repressor
  VARIANT 10: Xaa = Any Amino Acid
MGSRLDKSKXINSALELLNEVGIEGLTTRKLAQKLGVEQPTLYWHVKNKRALLDAMAIEMLDRHATHYCPLEGESWQDFLRNNAKSMRCALLSHRDGAKVCLGTGFTEKMYEGAENSMAFLCQQGFSLEHAMYAMQAAGIFTLGCVLLDQELQVAKEERETPTTDSMPPLVRQALELKDHQGAEPAFLFGLELIICGLEKQLKCESGS

SEQ ID NO: 217 - protein, 208 aa, Artificial Sequence
  Sulfonylurea responsive repressor
MGSRLDKSKVINSALELLNEVGIEGLTTRKLAQKLGVEQPTLYWHVKNKRALLDAMAIEMLDRHATHYCPLEGESWQDFLRNNAKSMRCALLSHRDGAKVCLGTGFTEQQYETAENSLAFLCQQGFSLEHAMYAMQAVGIFTLGCVLLDQELQVAKEERETPTTDSMPPLVRQALELKDHQGAEPAFLFGLELIICGLEKQLKCESGS

SEQ ID NO: 218 - protein, 208 aa, Artificial Sequence
  Sulfonylurea responsive repressor
MGSRLDKSKAINSALELLNEVGIEGLTTRKLAQKLGVEQPTLYWHVKNKRALLDAMAIEMLDRHATHVCPLEGESWQDFLRNNAKIMRCALLSHRDGAKVCLGTGFTEQQYETAENSLAFLCQQGFSLEHALYAMQAAGIFTLGCVLLDQELQVAKEERETPTTDSMPPLVRQALELNDHQGAEPAFLFGLELIICGLEKQLKCESGS

SEQ ID NO: 219 - protein, 208 aa, Artificial Sequence
  Sulfonylurea responsive repressor
MGSRLDKSKAINSALELLNEVGIEGLTTRKLAQKLGVEQPTLYWHVKNKRALLDALAIEMLDRHATHYCPLEGESWQDFLRNNAKSMRCALLSHRDGAKVCLGTGFTEQMYETAENSMAFLCQQGFSLENAMYAMQAAGIYTLGCVLLDQELQVAKEERETPTTDSMPPLVRQVLELKDHQGAEPAFLFGLELIICGLEKQLKCESGS

SEQ ID NO: 220 - protein, 208 aa, Artificial Sequence
  Sulfonylurea responsive repressor
MGSRLDKSKVINSALELLNEVGIEGLTTRKLAQKLGVEQPTLYWHVKNKRALLDAMAIEMLDRHATHYCPLEGKSWQDFLRNNAKSMRCALLSHRDGAKVCLGTGFTEQQYESAENSMAFLCQQGFSLEHAMYAMQAAGIFTLGCVLLDQELQVAKEERETPTTDSMPPLLRQALELKDHQGAEPAFLFGLELIICGLEKQLKCESGS

SEQ ID NO: 221 - protein, 208 aa, Artificial Sequence
  Sulfonylurea responsive repressor
  VARIANT 10: Xaa = Any Amino Acid
MGSRLDKSKXINSALELLNEVGIEGLTTRKLAQKLGVEQPTLYWHVKNKRALLDALAIEMLDRHATHYCPLEGESWQDFLRNNAKSMRCALLSHRDGAKVCLGTGFTEQMYESAENSLAFLCQQGFSLEHAMYAMQAAGIYTLGCVLLDQELQVAKEERETPTTDSMPPLVRQGLELKDHQGAEPAFLFGLELIICGLEKQLKCESGS

SEQ ID NO: 222 - protein, 208 aa, Artificial Sequence
  Sulfonylurea responsive repressor
MGSRLDKSKAINSALELLNEVGIEGLTTRKLAQKLGVEQPTLYWHVKNKRALLDAMAIEMLDRHATHYCPLEGESWQDFLRNNAKSMRCALLSHRDGAKVCLGTGFTEQQYEGAENSMAFLCQQGFSLENAMYAMQAVGIFTLGCVLLDQELQVAKEERETPTTDSMPPLVRQGLELKDHQGAEPAFLFGLELIICGLEKQLKCESGS

SEQ ID NO: 223 - protein, 208 aa, Artificial Sequence
  Sulfonylurea responsive repressor
  VARIANT 10: Xaa = Any Amino Acid
MGSRLDKSKXINSALELLNEVGIEGLTTRKLAQKLGVEQPTLYWHVKNKRALLDAMAIEMLDRHATHYCPLEGESWQDFLRNNAKSMRCALLSHRDGAKVCLGTGFTEQQYETAENSLAFLCQQGFSLEHALYAMQAVGIYTLGCVLLDQELQVAKEERETPTTDSMPPLARQALELKDHQGAEPAFLFGLELIICGLEKQLKCESGS

SEQ ID NO: 224 - protein, 208 aa, Artificial Sequence
  Sulfonylurea responsive repressor
  VARIANT 10: Xaa = Any Amino Acid
MGSRLDKSKXINSALELLNEVGIEGLTTRKLAQKLGVEQPTLYWHVKNKRALLDALAIEMLDRHATHYCPLEGESWQDFLRNNAKSMRCALLSHRDGAKVCLGTGFTEQHYETAENSMAFLCQQGFSLENALYAMQAVGIFTLGCVLLDQELQVAKEERETPTTDSMPPLVRQALELKDHQGAEPAFLFGLELIICGLEKQLKCESGS

SEQ ID NO: 225 - protein, 208 aa, Artificial Sequence
  Sulfonylurea responsive repressor
  VARIANT 10: Xaa = Any Amino Acid
MGSRLDKSKXINSALELLNEVGIEGLTTRKLAQKLGVEQPTLYWHVKNKRALLDAMAIEMLDRHATHYCPLEGESWQDFLRNNAKSMRCALLSHRDGAKVCLGTGFTEQQYESAENSMAFLCQQGFSLENAMYAMQAVGIYTLGCVLLDQELQVAKEERETPTTDSMPPLLRQVLELKDHQGAEPAFLFGLELIICGLEKQLKCESGS

SEQ ID NO: 226 - protein, 208 aa, Artificial Sequence
  Sulfonylurea responsive repressor
  VARIANT 10: Xaa = Any Amino Acid
MGSRLDKSKXINSALELLNEVGIEGLTTRKLAQKLGVEQPTLYWHVKNKRALLDALAIEMLDRHATHYCPLEGESWQDFLRNNAKSMRCALLSHRDGAKVCLGTGFTEKQYEAAENSLAFLCQQGFSLEHALYAMQAAGIYTLGCVLLDQELQVAKEERETPTTDSMPPLVRQALELKDHQGAEPAFLFGLELIICGLEKQLKCESGS

SEQ ID NO: 227 - protein, 208 aa, Artificial Sequence
  Sulfonylurea responsive repressor
MGSRLDKSKVINSALELLNEVGIEGLTTRKLAQKLGVEQPTLYWHVKNKRALLDAMAIEMLDRHATHYCPLEGESWQDFLRNNAKSMRCALLSHRDGAKVCLGTGFTEQHYETAENSMAFLCQQGFSLEHALYAMQAAGIYTLGCVLLDQELQVAKEERETPTTDSMPPLVRQALELKDHQGAEPAFLFGLELIICGLEKQLKCESGS

SEQ ID NO: 228 - protein, 208 aa, Artificial Sequence
  Sulfonylurea responsive repressor
  VARIANT 10: Xaa = Any Amino Acid
MGSRLDKSKXINSALELLNEVGIEGLTTRKLAQKLGVEQPTLYWHVKNKRALLDAMAIEMLDRHATHYCPLEGESWQDFLRNNAKSMRCALLSHRDGAKVCLGTGFTEQHYETAENSMAFLCQQGFSLENAMYAMQAVGIYTLGCVLLDQELQVAKEERETPTTDSMPPLVRQALELKDHQGAEPAFLFGLELIICGLEKQLKCESGS

SEQ ID NO: 229 - protein, 208 aa, Artificial Sequence
  Sulfonylurea responsive repressor
MGSRLDKSKVINSALELLNEVGIEGLTTRKLAQKLGVEQPTLYWHVKNKRALLDAMAIEMLDRHATHYCPLEGESWQDFLRNNAKSMRCALLSHRDGAKVCLGTGFTEQQYETAENSMAFLCKQGFSLENAMYAMQAVGIYTLGCVLLDQELQVAKEERETPTTDSMPPLVRQVLELKDHQGAEPAFLFGLELIICGLEKQLKCESGS

SEQ ID NO: 230 - protein, 208 aa, Artificial Sequence
  Sulfonylurea responsive repressor
  VARIANT 56, 113, 118, 174: Xaa = Any Amino Acid
MGSRLDKSKVINSALELLNEVGIEGLTTRKLAQKLGVEQPTLYWHVKNKRALLDAXAIEMLDRHATHYCPLEGESWQDFLRNNAKSMRCALLSHRDGAKVCLGTGFTEQHYEXAENSXAFLCQQGFSLEHALYAMQAVGIYTLGCVLLDQELQVAKEERETPTTDSMPPLVRQXLELKDHQGAEPAFLFGLELIICGLEKQLKCESGS

SEQ ID NO: 231 - protein, 208 aa, Artificial Sequence
  Sulfonylurea responsive repressor
MGSRLDKSKVINSALELLNEVGIEGLTTRKLAQKLGVEQPTLYWHVKNKRALLDALAIEMLDRHATHYCPLEGESWQDFLRNNAKSMRCALLSHRDGAKVCLGTGFTEQHYESAENSLAFLCQQGFSLENAMYAMQAVGIFTLGCVLLDQELQVAKEERETPTTDSMPPLVRQVLELKDHQGAEPAFLFGLELIICGLEKQLKCESGS

SEQ ID NO: 232 - protein, 208 aa, Artificial Sequence
  Sulfonylurea responsive repressor
MGSRLDKSKAINSALELLNEVGIEGLTTRKLAQKLGVEQPTLYWHVKNKRALLDAMAIEMLDRHATHYCPLEGESWQDFLRNNAKSMRCALLSHRDGAKVCLGTGFTEQQYETAENSLAFLCQQGFSLENALYAMQAVGIYTLGCVLLDQELQVAKEERETPTTDSMPPLVRQVLELKDHQGAEPAFLFGLELIICGLEKQLKCESGS

SEQ ID NO: 233 - protein, 208 aa, Artificial Sequence
  Sulfonylurea responsive repressor
MGSRLDKSKVINSALELLNEVGIEGLTTRKLAQKLGVEQPTLYWHVKNKRALLDAMAIEMLDRHATHYCPLEGESWQDFLRNNAKSMRCALLSHRDGAKVCLGTGFTEQQYEAAENSMAFLCQQDFSLEHAMYAMQAVGIYTLGCVLLDQELQVAKEERETPTTDSMPPLVRQGLELKDHQGAEPAFLFGLELIICGLEKQLKCESGS

SEQ ID NO: 234 - protein, 208 aa, Artificial Sequence
  Sulfonylurea responsive repressor
  VARIANT 113: Xaa = Any Amino Acid
MGSRLDKSKVINSALELLNEVGIEGLTTRKLAQKLGVEQPTLYWHVKNKRALLDAMAIEMLDRHATHYCPLEGKSWQDFLRNNAKSMRCALLSHRDGAKVCLGTGFTEQHYEXAENSMAFLCQQGFSLEHAMYAMQAAGIFTLGCVLLDQELQVAKEERETPTTDSMPPLLRQALELKDHQGAEPAFLFGLELIICGLEKQLKCESGS

SEQ ID NO: 235 - protein, 208 aa, Artificial Sequence
  Sulfonylurea responsive repressor
MGSRLDKSKVINSALELLNEVGIEGLTTRKLAQKLGVEQPTLYWHVKNKRALLDAMAIEMLDRHATHYCPLEGESWQDFLRNNAKSMRCALLSHRDGAKVCLGTGFTEQQYETAENSLAFLCQQGFSLEHAMYAMQAAGIYTLGCVLLDQELQVAKEERETPTTDSMPPLVRQALELKDHQGAEPAFLFGLELIICGLEKQLKCESGS

SEQ ID NO: 236 - protein, 208 aa, Artificial Sequence
  Sulfonylurea responsive repressor
  VARIANT 10: Xaa = Any Amino Acid
MGSRLDKSKXINSALELLNEVGIEGLTTRKLAQKLGVEQPTLYWHVKNKRALLDAMAIEMLDRHATHYCPLEGESWQDFLRNNAKSMRCALLSHRDGAKVCLGTGFTEQQYETAENSMAFLCQQGFSLENALYAMQAVGIYTLGCVLLDQELQVAKEERETPTTDSMPPLVRQALELKDHQGAEPAFLFGLELIICGLEKQLKCESGS

SEQ ID NO: 237 - protein, 208 aa, Artificial Sequence
  Sulfonylurea responsive repressor
MGSRLDKSKAINSALELLNEVGIEGLTTRKLAQKLGVEQPTLYWHVKNKRALLDALAIEMLDRHATHYCPLEGESWQDFLRNNAKSMRCALLSHRDGAKVCLGTGFTEKHYETAENSMAFLCQQGFSLEHAMYAMQAVGIYTLGCVLLDQELQVAKEERETPTTDSMPPLVRQVLELKDHQGAEPAFLFGLELIICGLEKQLKCESGS

SEQ ID NO: 238 - protein, 208 aa, Artificial Sequence
  Sulfonylurea responsive repressor
  VARIANT 10: Xaa = Any Amino Acid
MGSRLDKSKXINSALELLNEVGIEGLTTRKLAQKLGVEQPTLYWHVKNKRALLDALAIEMLDRHATHYCPLEGESWQDFLRNNAKSMRCALLSHRDGAKVCLGTGFTEKQYEAAENSMAFLCQQGFSLEHAMYAMQAAGIYTLGCVLLDQELQVAKEERETPTTDSMPPLVRQVLELKDHQGAEPAFLFGLELIICGLEKQLKCESGS

SEQ ID NO: 239 - protein, 208 aa, Artificial Sequence
  Sulfonylurea responsive repressor
  VARIANT 10: Xaa = Any Amino Acid
MGSRLDKSKXINSALELLNEVGIEGLTTRKLAQKLGVEQPTLYWHVKNKRALLDAMAIEMLDRHATHYCPLEGESWQDFLRNNAKSMRCALLSHRDGAKVCLGTGFTEQQYETAENSMAFLCQQGFSLENAMYAMQAACIYTLGCVLLDQELQVAKEERETPTTDSMPPLVRQVLELKDHQGAEPAFLFGLELIICGLEKQLKCESGS

SEQ ID NO: 240 - protein, 208 aa, Artificial Sequence
  Sulfonylurea responsive repressor
  VARIANT 10: Xaa = Any Amino Acid
MGSRLDKSKXINSALELLNEVGIEGLTTRKLAQKLGVEQPTLYWHVKNKRALLDAMAIEMLDRHATHYCPLEGESWQDFLRNNAKSMRCALLSHRDGAKVCLGTGFTEQQYETAENSLAFLCQQGFSLEHALYAMQAAGIFTLGCVLLDQELQVAKEERETPTTDSMPPLVRQALELKDHQGAEPAFLFGLELIICGLEKQLKCESGS

SEQ ID NO: 241 - protein, 208 aa, Artificial Sequence
  Sulfonylurea responsive repressor
  VARIANT 10: Xaa = Any Amino Acid
MGSRLDKSKXINSALELLNEVGIEGLTTRKLAQKLGVEQPTLYWHVKNKRALLDAMAIEMLDRHATHVCPLEGESWQDFLRNNAKSMRCALLSHRDGAKVCLGTGFTEQQYEGAENSMAFLCQQGFSLEHAMYAMQAVGIYTLGCVLLDQELQVAKEERETPTTDSMPPLVRQALELKDHQGAEPAFLFGLELIICGLEKQLKCGSGS

SEQ ID NO: 242 - protein, 208 aa, Artificial Sequence
  Sulfonylurea responsive repressor
MGSRLDKSKVINSALELLNEVGIEGLTTRKLAQKLGVEQPTLYWHVKNKRALLDALAIEMLDRHATHICPLEGESWQDFLRNNAKSMRCALLSHRDGAKVCLGTGFTEQMYETAENSMAFLCQQGFSLENAMYAMQAAGIFTLGCVLLDQELQVAKEERETPTTDSMPPLVRQVLELKDHQGAEPAFLFGLELIICGLEKQLKCESGS

SEQ ID NO: 243 - protein, 208 aa, Artificial Sequence
  Sulfonylurea responsive repressor
  VARIANT 10: Xaa = Any Amino Acid
MGSRLDKSKXINSALELLNEVGIEGLTTRKLAQKLGVEQPTLYWHVKNKRALLDALAIEMLDRHATHYCPLEGESWQDFLRNNAKSMRCALLSHRDGAKVCLGTGFTEQMYESAENSLAFLCQQGFSLEHAMYAMQAAGIFTLGCVLLDQELQVAKEERETPTTDSMPPLVRQVLELKDHQGAEPAFLFGLELIICGLEKQLKCESGS

SEQ ID NO: 244 - protein, 208 aa, Artificial Sequence
  Sulfonylurea responsive repressor
  VARIANT 199: Xaa = Any Amino Acid
MGSRLDKSKVINSALELLNEVGIEGLTTRKLAQKLGVEQPTLYWHVKNKRALLDAMAIEMLDRHATHYCPLEGESWQDFLRNNAKSMRCALLSHRDGAKVCLGTGFTEQHYESAENSMAFLCQQGFSLEHAMYAMQAAGIYTLGCVLLDQELQVAKEERQTPTTDSMPPLVRQALELKDHQGAEPAFLFGLELIICGLXKQLKCESGS

SEQ ID NO: 245 - protein, 208 aa, Artificial Sequence
  Sulfonylurea responsive repressor
  VARIANT 10: Xaa = Any Amino Acid
MGSRLDKSKXINSALELLNEVGIEGLTTRKLAQKLGVEQPTLYWHVKNKRALLDAMAIEMLDRHATHLCPLEGESWQDFLRNNAKSMRCALLSHRDGAKVCLGTGFTEQQYETAENSMAFLCQQGFSLEHAMYAMQAVGIYTLGCVLLDQELQVAKEERETPTTDSMPPLLRQALELKDHQGAEPAFLFGLELIICGLEKQLKCESGS

SEQ ID NO: 246 - protein, 208 aa, Artificial Sequence
  Sulfonylurea responsive repressor
  VARIANT 56, 110: Xaa = Any Amino Acid
MGSRLDKSKVINSALELLNEVGIEGLTTRKLAQKLGVEQPTLYWHVKNKRALLDAXAIEMLDRHATHYCPLEGESWQDFLRNNAKSMRCALLSHRDGAKVCLGTGFTEQXYEAAENSMAFLCQQGFSLEHAMYAMQAAGIYTLGCVLLDQELQVAKEERETPTTDSMPPLVRQVLELKDHQGAEPAFLFGLELIICGLEKQLKCESGS

SEQ ID NO: 247 - protein, 208 aa, Artificial Sequence
  Sulfonylurea responsive repressor
  VARIANT 171: Xaa = Any Amino Acid
MGSRLDKSKVINSALELLNEVGIEGLTTRKLAQKLGVEQPTLYWHVKNKRALLDAMAIEMLDRHATHYCPLEGESWQDFLRNNAKSMRCALLSHRDGAKVCLGTGFTEQQYETAENSMAFLCQQGFSLEHALYAMQAAGIYTLGCVLLDQELQVAKEERETPTTDSMPPLXRQVLELKDHQGAEPAFLFGLELIICGLEKQLKCESGS

SEQ ID NO: 248 - protein, 208 aa, Artificial Sequence
  Sulfonylurea responsive repressor
  VARIANT 10: Xaa = Any Amino Acid
MGSRLDKSKXINSALELLNEVGIEGLTTRKLAQKLGVEQPTLYWHVKNKRALLDAMAIEMLDRHATHYCPLEGESWQDFLRNNAKSMRCALLSHRDGAKVCLGTGFTEQQYETAENSLAFLCQQGFSLEHAMYAMQAVGIFTLGCVLLDQELQVAKEERETPTTDSMPPLVRQVLELKDHQGAEPAFLFGLELIICGLEKQLKCESGS

SEQ ID NO: 249 - protein, 208 aa, Artificial Sequence
  Sulfonylurea responsive repressor
MGSRLDKSKVINSALELLNEVGIEGLTTRKLAQKLGVEQPTLYWHVKNKRALLDAMAIEMLDRHATHYCPLEGESWQDFLRNNAKSMRCALLSHRDGAKVCLGTGFTEQQYETAENSLAFLCQQGFSLENALYAMQAVGIYTLGCVLLDQELQVAKEERETPTTDSMPPLVRQALELKDHQGAEPAFLFGLELIICGLEKQLKCESGS

SEQ ID NO: 250 - protein, 208 aa, Artificial Sequence
  Sulfonylurea responsive repressor
MGSRLDKSKVINSALELLNEVGIEGLTTRKLAQKLGVEQPTLYWHVKNKRALLDAMAIEMLDRHATHYCPLEGESWQDFLRNNAKSMRCALLSHRDGAKVCLGTGFTEQHYETAENSLAFLCQQGFSLEHAMYAMQAVGIYTLGCVLLDQELQVAKEERETPTTDSMPPLVRQALELKDHQGAEPAFLFGLELIICGLEKQLKCESGS

SEQ ID NO: 251 - protein, 208 aa, Artificial Sequence
  Sulfonylurea responsive repressor
  VARIANT 10: Xaa = Any Amino Acid
MGSRLDKSKXINSALELLNEVGIEGLTTRKLAQKLGVEQPTLYWHVKNKRALLDAMAIEMLDRHATHYCPLEEESWQDFLRNNAKSMRCALLSHRDGAKVCLGTGFTEQQYEAAENSMAFLCQQGFSLEHALYAMQAAGIYTLGCVLLDQELQVAKEERETPTTDSMPPLVRQALELKDHQGAEPAFLFGLELIICGLEKQLKCESGS

SEQ ID NO: 252 - protein, 208 aa, Artificial Sequence
  Sulfonylurea responsive repressor
MGSRLDKSKVINSALELLNEVGIEGLTTRKLAQKLGVEQPTLYWHVKNKRALLDAMAIEMLDRHATHYCPLEGESWQDFLRNNAKSMRCALLSHRDGAKVCLGTGFTEQQYETAENSLAFLCQQGFSLENAMYAMQAAGIYTLGCVLLDQELQVAKEERETPTTDSMPPLVRQGLELKDHQGAEPAFLFGLELIICGLEKQLKCESGS

SEQ ID NO: 253 - protein, 208 aa, Artificial Sequence
  Sulfonylurea responsive repressor
MGSRLDKSKAINSALELLNEVGIEGLTTRKLAQKLGVEQPTLYWHVKNKRALLDALAIEMLDRHATHYCPLEGESWQDFLRNNAKSMRCALLSHRDGAKVCLGTGFTEQHYETAENSLAFLCQQGFSLENAMYAMQAVGIFTLGCVLLDQELQVAKEERETPTTDSMPPLVRQVLELKDHQGAEPAFLFGLELIICGLEKQLKCESGS

SEQ ID NO: 254 - protein, 208 aa, Artificial Sequence
  Sulfonylurea responsive repressor
MGSRLDKSKVINSALELLNEVGIEGLTTRKLAQKLGVEQPTLYWHVKNKRALLDAMAIEMLDRHATHYCPLEGESWQDFLRNNAKSMRCALLSHRDGAKVCLGTGFTEQQYESAENSLAFLCQQGFSLENAMYAMQAAGIYTLGCVLLDQELQVAKEERETPTTDSMPPLLRQALELKDHQGAEPAFLFGLELIICGLEKQLKCESGS

SEQ ID NO: 255 - protein, 208 aa, Artificial Sequence
  Sulfonylurea responsive repressor
  VARIANT 10: Xaa = Any Amino Acid
MGSRLDKSKXINSALELLNEVGIEGLTTRKLAQKLGVEQPTLYWHVKNKRALLDAMAIEMLDRHATHYCPLEGESWQDFLRNNAKSMRCALLSQRDGAKVCLGTGFTEQQYEGAENSLAFLCQQGFSLEHALYAMQAAGIFTLGCVLLDQELQVAKEERETPTTDSMPPLVRQALELKDHQGAEPAFLFGLELIICGLEKQLKCESGS

SEQ ID NO: 256 - protein, 208 aa, Artificial Sequence
  Sulfonylurea responsive repressor
MGSRLDKSKVINSALELLNEVGIEGLTTRKLAQKLGVEQPTLYWHVKNKRALLDAMAIEMLDRHATHYCPLEGESWQDFLRNNAKSMRCALLSHRDGAKVCLGTGFTEQQYETAENSMAFLCQQGFSLENALYAMQAAGIYTLGCVLLDQELQVAKEERETPTTDSMPPLVRQGLELKDHQGAEPAFLFGLELIICGLEKQLKCESGS

SEQ ID NO: 257 - protein, 208 aa, Artificial Sequence
  Sulfonylurea responsive repressor
MGSRLDKSKVINSALELLNEVGIEGLTTRKLAQKLGVEQPTLYWHVKNKRALLDALAIEMLDRHATHYCPLEGESWQDFLRNNAKSMRCALLSHRDGAKVCLGTGFTEQMYESAENSMAFLCQQGFSLENAMYAMQAAGIYTLGCVLLDQELQVAKEERETPTTDSMPPLVRQGLELKDHQGAEPAFLFGLELIICGLEKQLKCESGS

SEQ ID NO: 258 - protein, 208 aa, Artificial Sequence
  Sulfonylurea responsive repressor
MGSRLDKSKVINSALELLNEVGIEGLTTRKLAQKLGVEQPTLYWHVKNKRALLDAMAIEMLDRHATHYCPLEGESWQDFLRNNAKSMRCALLSHRDGAKVCLGTGFTEQQYEGAENSMAFLCQQGFSLENAMYAMQAVGIFTLGCVLLDQELQVAKEERETPTTDSMPPLVRQALELKDHQGAEPAFLFGLELIICGLEKQLKCESGS

SEQ ID NO: 259 - protein, 208 aa, Artificial Sequence
  Sulfonylurea responsive repressor
  VARIANT 68, 110, 113, 132: Xaa = Any Amino Acid
MGSRLDKSKVINSALELLNEVGIEGLTTRKLAQKLGVEQPTLYWHVKNKRALLDALAIEMLDRHATHXCPLEGESWQDFLRNNAKSMRCALLSHRDGAKVCLGTGFTEQXYEXAENSMAFLCQQGFSLEHAXYAMQAAGIFTLGCVLLDQELQVAKEERETPTTDSMPPLLRQALELKDHQGAEPAFLFGLELIICGLEKQLKCESGS

SEQ ID NO: 260 - protein, 208 aa, Artificial Sequence
  Sulfonylurea responsive repressor
MGSRLDKSKVINSALELLNEVGIEGLTTRKLAQKLGVEQPTLYWHVKNKRALLDAMAIEMLDRHATHICPLEGESWQDFLRNNAKSMRCALLSHRDGAKVCLGTGFTEQQYETAENSLAFLCQQGFSLENALYAMQAAGIFTLGCVLLDQELQVAKEERETPTTDSMPPLVRQVLELKDHQGAEPAFLFGLELIICGLEKQLKCESGS

SEQ ID NO: 261 - protein, 208 aa, Artificial Sequence
  Sulfonylurea responsive repressor
  VARIANT 68, 113, 130, 139, 171, 174: Xaa = Any Amino Acid
MGSRLDKSKVINSALELLNEVGIEGLTTRKLAQKLGVEQPTLYWHVKNKRALLDALAIEMLDRHATHXCPLEGESWQDFLRNNAKSMRCALLSHRDGAKVCLGTGFTEQLYEXAENSLAFLCQQGFSLEXALYAMQAAXIYTLGCVLLDQELQVAKEERETPTTDSMPPLXRQXLELKDHQGAEPAFLFGLELIICGLEKQLKCESGS

SEQ ID NO: 262 - protein, 208 aa, Artificial Sequence
  Sulfonylurea responsive repressor
MGSRLDKSKVINSALELLNEVGIEGLTTRKLAQKLGVEQPTLYWHVKNKRALLDALAIEMLDRHATHYCPLEGESWQDFLRNNAKSMRCALLSHRDGAKVCLGTGFTEKQYESAENSLAFLCQQGFSLEHAMYAMQAAGIYTLGCVLLDQELQVAKEERETPTTDSMPPLVRQALELKDHQGAEPAFLFGLELIICGLEKQLKCESGS

SEQ ID NO: 263 - protein, 208 aa, Artificial Sequence
  Sulfonylurea responsive repressor
  VARIANT 171: Xaa = Any Amino Acid
MGSRLDKSKVINSALELLNEVGIEGLTTRKLAQKLGVEQPTLYWHVKNKRALLDAMAIEMLDRHATHYCPLEGESWQDFLRNNAKSMRCALLSHRDGAKVCLGTGFTEQQYESAENSMAFLCQQGFSLEHAMYAMQAAGIYTLGCVLLDQELQVAKEERETPTTDSMPPLXRQVLELKDHQGAEPAFLFGLELIICGLEKQLKCESGS

SEQ ID NO: 264 - protein, 208 aa, Artificial Sequence
  Sulfonylurea responsive repressor
  VARIANT 56, 118, 139: Xaa = Any Amino Acid
MGSRLDKSKVINSALELLNEVGIEGLTTRKLAQKLGVEQPTLYWHVKNKRALLDAXAIEMLDRHATHYCPLEGESWQDFLRNNAKSMRCALLSHRDGAKVCLGTGFTEQMYETAENSXAFLCQQGFSLEHAMYAMQAAXIYTLGCVLLDQELQVAKEERETPTTDSMPPLARQGLELKDHQGAEPAFLFGLELIICGLEKQLKCESGS

SEQ ID NO: 265 - protein, 208 aa, Artificial Sequence
  Sulfonylurea responsive repressor
  VARIANT 110: Xaa = Any Amino Acid
MGSRLDKSKVINSALELLNEVGIEGLTTRKLAQKLGVEQPTLYWHVKNKRALLDAMAIEMLDRHATHYCPLEGESWQDFLRNNAKSMRCALLSHRDGAKVCLGTGFTEQXYEAAENSMAFLCQQGFSLEHAMYAMQAAGIFTLGCVLLDQELQVAKEERETPTTDSMPPLVRQALELKDHQGAEPAFLFGLELIICGLEKQLKCESGS

SEQ ID NO: 266 - protein, 208 aa, Artificial Sequence
  Sulfonylurea responsive repressor
  VARIANT 68: Xaa = Any Amino Acid
MGSRLDKSKVINSALELLNEVGIEGLTTRKLAQKLGVEQPTLYWHVKNKRALLDAMAIEMLDRHATHXCPLEGESWQDFLRNNAKSMRCALLSHRDGAKVCLGTGFTEQQYEGAENSLAFLCQQGFSLEHAMYAMQAVGIYTLGCVLLDQELQVAKEERETPTTDSMPPLVRQGLELKDHQGAEPAFLFGLELIICGLEKQLKCESGS

SEQ ID NO: 267 - protein, 208 aa, Artificial Sequence
  Sulfonylurea responsive repressor
  VARIANT 110, 113, 141, 199: Xaa = Any Amino Acid
MGSRLDKSKVINSALELLNEVGIEGLTTRKLAQKLGVEQPTLYWHVKNKRALLDAMAIEMLDRHATHYCPLEGESWQDFLRNNAKSMRCALLSHRDGAKVCLGTGFTEQXYEXAENSLAFLCQQGFSLEHAMYAMQAAGIXTLGCVLLDQELQVAKEERETPTTDSMPPLARQGLELKDHQGAEPAFLFGLELIICGLXKQLKCESGS

SEQ ID NO: 268 - protein, 208 aa, Artificial Sequence
  Sulfonylurea responsive repressor
  VARIANT 154, 195, 199: Xaa = Any Amino Acid
MGSRLDKSKVINSALELLNEVGIEGLTTRKLAQKLGVEQPTLYWHVKNKRALLDAMAIEMLDRHATHYCPLEGESWQDFLRNNAKSMRCALLSHRDGAKVCLGTGFTEQQYESAENSMAFLCQQGFSLEHAMYAMQAAGIYTLGCVLLDQELQXAKEERETPTTDSMPPLLRQVLELNDHQGAEPAFLFGLELIXCGLXKQLKCESGS

SEQ ID NO: 269 - protein, 208 aa, Artificial Sequence
  Sulfonylurea responsive repressor
  VARIANT 93, 154, 161, 166, 173, 186, 195, 200, 201: Xaa = Any Amino Acid
MGSRLDKSKVINSALELLNEVGIEGLTTRKLAQKLGVEQPTLYWHVKNKRALLDAMAIEMLDRHATHYCPLEGESWQDFLRNNAKSMRCALLXHRDGAKVCLGTGFTEQQYEGAENSLAFLCQQGFSLEHAMYAMQAAGIYTLGCVLLDQELQXAKEEREXPTTDXMPPLARXGLELKDHQGPEPXFLFGLELIXCGLEXXLKCESGS

SEQ ID NO: 270 - protein, 208 aa, Artificial Sequence
  Sulfonylurea responsive repressor
MGSRLDKSKVINSALELLNEVGIEGLTTRKLAQKLGVEQPTLYWHVKNKRALLDAMAIEMLDRHATHVCPLEGESWQDFLRNNAKSMRCALLSHRDGAKVCLGTGFTEQQYEGAENSMAFLCQQGFSLEHAMYAMQAVGIYTLGCVLLDQELQVAKEERETPTTDSMPPLVRQALELKDHQGAEPAFLFGLELIICGLEKQLKCGSGS

SEQ ID NO: 271 - protein, 208 aa, Artificial Sequence
  Sulfonylurea responsive repressor
  VARIANT 56, 68, 109, 110, 118, 130, 139, 141: Xaa = Any Amino Acid
MGSRLDKSKVINSALELLNEVGIEGLTTRKLAQKLGVEQPTLYWHVKNKRALLDAXAIEMLDRHATHXCPLEGESWQDFLRNNAKSMRCALLSHRDGAKVCLGTGFTEXXYEGAENSXAFLCQQGFSLEXAMYAMQAAXIXTLGCVLLDQELQVAKEERETPTTDSMPPLARQVLELKDHQGAEPAFLFGLELIICGLEKQLKCESGS

SEQ ID NO: 272 - protein, 208 aa, Artificial Sequence
  Sulfonylurea responsive repressor
  VARIANT 109, 110, 132, 138, 171: Xaa = Any Amino Acid
MGSRLDKSKVINSALELLNEVGIEGLTTRKLAQKLGVEQPTLYWHVKNKRALLDAMAIEMLDRHATHYCPLEGESWQDFLRNNAKSMRCALLSHRDGAKVCLGTGFTEXXYESAENSMAFLCQQGFSLEHAXYAMQAXGIYTLGCVLLDQELQVAKEERETPTTDSMPPLXRQALELKDHQGAEPAFLFGLELIICGLEKQLKCESGS

SEQ ID NO: 273 - protein, 208 aa, Artificial Sequence
  Sulfonylurea responsive repressor
MGSRLDKSKVINSALELLNEVGIEGLTTRKLAQKLGVEQPTLYWHVKNKRALLDALAIEMLDRHATHYCPLEGESWQDFLRNNAKSMRCALLSHRDGAKVCLGTGFTEKQYETAENSMAFLCQQGFSLENALYAMQAVGIYTLGCVLLDQELQVAKEERETPTTDSMPPLVRQALELKDHQGAEPAFLFGLELIICGLEKQLKCESGS

SEQ ID NO: 274 - protein, 208 aa, Artificial Sequence
  Sulfonylurea responsive repressor
MGSRLDKSKVINSALELLNEVGIEGLTTRKLAQKLGVEQPTLYWHVKNKRALLDALAIEMLDRHATHYCPLEGESWQDFLRNNAKSMRCALLSHRDGAKVCLGTGFTEQMYETAENSLAFLCQQGFSLEHAMYAMQAAGIFTLGCVLLDQELQVAKEERETPTTDSMPPLVRQVLELKDHQGAEPAFLFGLELIICGLEKQLKCESGS

SEQ ID NO: 275 - protein, 208 aa, Artificial Sequence
  Sulfonylurea responsive repressor
  VARIANT 109: Xaa = Any Amino Acid
MGSRLDKSKVINSALELLNEVGIEGLTTRKLAQKLGVEQPTLYWHVKNKRALLDAMAIEMLDRHATHYCPLEGESWQDFLRNNAKSMRCALLSHRDGAKVCLGTGFTEXLYESAENSLAFLCQQGFSLEHAMYAMQAVGIYTLGCVLLDQELQVAKEERETPTTDSMPPLVRQVLELKDHQGAEPAFLFGLELIICGLEKQLKCESGS

SEQ ID NO: 276 - protein, 208 aa, Artificial Sequence
  Sulfonylurea responsive repressor
MGSRLDKSKVINSALELLNEVGIEGLTTRKLAQKLGVEQPTLYWHVKNKRALLDALAIEMLDRHATHYCPLEGESWQDFLRNNAKSMRCALLSHRDGAKVCLGTGFTEQMYETAENSMAFLCQQGFSLEHALYAMQAAGIFTLGCVLLDQELQVAKEERETPTTDSMPPLVRQALELKDHQGAEPAFLFGLELIICGLEKQLKCESGS

SEQ ID NO: 277 - protein, 208 aa, Artificial Sequence
  Sulfonylurea responsive repressor
MGSRLDKSKVINSALELLNEVGIEGLTTRKLAQKLGVEQPTLYWHVKNKRALLDAMAIEMLDRHATHYCPLEGESWQDFLRNNAKSMRCALLSHRDGAKVCLGTGFTEQMYESAENSLAFLCQQGFSLENALYAMQAVGIYTLGCVLLDQELQVAKEERETPTTDSMPPLVRQVLELKDHQGAEPAFLFGLELIICGLEKQLKCESGS

SEQ ID NO: 278 - protein, 208 aa, Artificial Sequence
  Sulfonylurea responsive repressor
MGSRLDKSKVINSALELLNEVGIEGLTTRKLAQKLGVEQPTLYWHVKNKRALLDAMAIEMLDRHATHFCPLEGESWQDFLRNNAKSMRCTLLSHRDGAKVCLGTGFTEQQYESAENSLAFLCQQGFSLENAMYAMQAVGIYTLGCVLLDQELQVAKEERETPTTDSMPPLVRQALELKDHQGAEPAFLFGLELIICGLEKQLKCESGS

SEQ ID NO: 279 - protein, 208 aa, Artificial Sequence
  Sulfonylurea responsive repressor
MGSRLDKSKVINSALELLNEVGIEGLTTRKLAQKLGVEQPTLYWHVKNKRALLDALAIEMLDRHATHICPLEGESWQDFLRNNAKSMRCALLSHRDGAKVCLGTGFTEQMYEAAENSMAFLCQQGFSLENAMYAMQAAGIYTLGCVLLDQELQVAKEERETPTTDSMPPLVRQALELKDHQGAEPAFLFGLELIICGLEKQLKCESGS

SEQ ID NO: 280 - protein, 208 aa, Artificial Sequence
  Sulfonylurea responsive repressor
MGSRLDKSKVINSALELLNEVGIEGLTTRKLAQKLGVEQPTLYWHVKNKRALLDAMAIEMLDRHATHYCPLEGESWQDFLRNNAKSMRCALLSHRDGAKVCLGTGFTEQHYETAENSLAFLCQQGFSLENAMYAMQAAGIYTLGCVLLDQELQVAKEERETPTTDSMPPLVRQVLELKDHQGAEPAFLFGLELIICGLEKQLKCESGS

SEQ ID NO: 281 - protein, 208 aa, Artificial Sequence
  Sulfonylurea responsive repressor
MGSRLDKSKVINSALELLNEVGIEGLTTRKLAQKLGVEQPTLYWHVKNKRALLDAMAIEMLDRHATHLCPLEGESWQDFLRNNAKSMRCALLSHRDGAKVCLGTGFTEQQYETAENSMAFLCQQGFSLEHAMYAMQAAGIYTLGCVLLDQELQVAKEERETPTTDSMPPLVRQGLELKDHQGAEPAFLFGLELIICGLEKQLKCESGS

SEQ ID NO: 282 - protein, 208 aa, Artificial Sequence
  Sulfonylurea responsive repressor
MGSRLDKSKVINSALELLNEVGIEGLTTRKLAQKLGVEQPTLYWHVKNKRALLDALAIEMLDRHATHFCPLEGESWQDFLRNNAKSMRCALLSHRDGAKVCLGTGFTEQMYEAAENSMAFLCQQGFSLEHAMYAMQAVCIYTLGCVLLDQELQVAKEERETPTTDSMPPLARQGLELKDHQGAEPAFLFGLELIICGLEKQLKCESGS

SEQ ID NO: 283 - protein, 208 aa, Artificial Sequence
  Sulfonylurea responsive repressor
MGSRLDKSKVINSALELLNEVGIEGLTTRKLAQKLGVEQPTLYWHVKNKRALLDALAIEMLDRHATHYCPLEGESWQDFLRNNAKSMRCALLSHRDGAKVCLGTGFTEQHYETAENSLAFLCQQGFSLENAMYAMQAVGIFTLGCVLLDQELQVAKEERETPTTDSMPPLVRQVLELKDHQGAEPAFLFGLELIICGLEKQLKCESGS

SEQ ID NO: 284 - protein, 208 aa, Artificial Sequence
  Sulfonylurea responsive repressor
MGSRLDKSKVINSALELLNEVGIEGLTTRKLAQKLGVEQPTLYWHVKNKRALLDAMAIEMLDRHATHYCPLEGESWQDFLRNNAKSMRCALLSHRDGAKVCLGTGFTEQQYESAENSLAFLCQQGFSLENAMYAMQAAGIYTLGCVLLDQELQVAKEERETPTTDSMPPLVRQALELKDHQGAEPAFLFGLELIICGLEKQLKCESGS

SEQ ID NO: 285 - protein, 208 aa, Artificial Sequence
  Sulfonylurea responsive repressor
MGSRLDKSKVINSALELLNEVGIEGLTTRKLAQKLGVEQPTLYWHVKNKRALLDAMAIEMLDRHATHYCPLEGESWQDFLRNNAKSMRCALLSHRDGAKVCLGTGFTEQQYEAAENSLAFLCQQGFSLENALYAMQAVGIYTLGCVLLDQELQVAKEERETPTTDSMPPLARQALELKDHQGAEPAFLFGLELIICGLEKQLKCESGS

SEQ ID NO: 286 - protein, 208 aa, Artificial Sequence
  Sulfonylurea responsive repressor
MGSRLDKSKVINSALELLNEVGIEGLTTRKLAQKLGVEQPTLYWHVKNKRALLDAMAIEMLDRHATHFCPLEGESWQDFLRNNAKSMRCALLSHRDGAKVCLGTGFTEQQYEAAENSMAFLCQQGFSLEHALYAMQAVGIFTLGCVLLDQELQVAKEERETPTTDSMPPLVRQGLELKDHQGAEPAFLFGLELIICGLEKQLKCESGS

SEQ ID NO: 287 - protein, 208 aa, Artificial Sequence
  Sulfonylurea responsive repressor
MGSRLDKSKVINSALELLNEVGIEGLTTRKLAQKLGVEQPTLYWHVKNKRALLDALAIEMLDRHATHYCPLEGESWQDFLRNNAKSMRCALLSHRDGAKVCLGTGFTEQMYETAENSMAFLCQQGFSLENAMYAMQAVGIFTLGCVLLDQELQVAKEERETPTTDSMPPLVRQVLELKDHQGAEPAFLFGLELIICGLEKQLKCESGS

SEQ ID NO: 288 - protein, 208 aa, Artificial Sequence
  Sulfonylurea responsive repressor
MGSRLDKSKVINSALELLNEVGIEGLTTRKLAQKLGVEQPTLYWHVKNKRALLDALAIEMLDRHATHYCPLEGESWQDFLRNNAKSMRCALLSHRDGAKVCLGTGFTEKQYESAENSLAFLCQQGFSLEHALYAMQAVGIYTLGCVLLDQELQVAKEERETPTNDSMPPLVRQVLELKDHQGAEPAFLFGLELIICGLEKQLKCESGS

SEQ ID NO: 289 - protein, 208 aa, Artificial Sequence
  Sulfonylurea responsive repressor
MGSRLDKSKVINSALELLNEVGIEGLTTRKLAQKLGVEQPTLYWHVKNKRALLDAMAIEMLDRHATHYCPLEGESWQDFLRNNAKSMRCALLSHRDGAKVCLGTGFTEQQYETAENSMAFLCQQGFSLENAMYAMQAACIYTLGCVLLDQELQVAKEERETPTTDSMPPLVRQVLELKDHQGAEPAFLFGLELIICGLEKQLKCESGS

SEQ ID NO: 290 - protein, 208 aa, Artificial Sequence
  Sulfonylurea responsive repressor
MGSRLDKSKVINSALELLNEVGIEGLTTRKLAQKLGVEQPTLYWHVKNKRALLDALAIEMLDRHATHYCPLEGESWQDFLRNNAKSMRCALLSHRDGAKVCLGTGFTEQMYETAENSMAFLCQQGFSLEHAMYAMQAVGIFTLGCVLLDQELQVAKEERETPTTDSMPPLVRQALELKDHQGAEPAFLFGLELIICGLEKQLKCESGS

SEQ ID NO: 291 - protein, 208 aa, Artificial Sequence
  Sulfonylurea responsive repressor
MGSRLDKSKVINSALELLNEVGIEGLTTRKLAQKLGVEQPTLYWHVKNKRALLDAMAIEMLDRHATHICPLEEESWQDFLRNNAKSMRCALLSHRDGAKVCLGTGFTEQQYETAENSMAFLCQQGFSLEHAMYAMQAACIYTLGCVLLDQELQVAKEERETPTTDSMPPLVRQVLELKDHQGAEPAFLFGLELIICGLEKQLKCESGS

SEQ ID NO: 292 - protein, 208 aa, Artificial Sequence
  Sulfonylurea responsive repressor
MGSRLDKSKVINSALELLNEVGIEGLTTRKLAQKLGVEQPTLYWHVKNKRALLDAMAIEMLDRHATHYCPLEGESWQDFLRNNAKSMRCALLSHRDGAKVCLGTGFTEQHYETAENSMAFLCQQGFSLEHAMYAMQAAGIYTLGCVLLDQELQVAKEERETPTTDSMPPLVRQALELKDHQGAEPAFLFGLELIICGLEKQLKCESGS

SEQ ID NO: 293 - protein, 208 aa, Artificial Sequence
  Sulfonylurea responsive repressor
MGSRLDKSKVINSALELLNEVGIEGLTTRKLAQKLGVEQPTLYWHVKNKRALLDAMAIEMLDRHATHYCPLEGESWQDFLRNNARSMRCALLSHRDGAKVCLGTGFTEQMYETAENSLAFLCQQGFSLENAMYAMQAAGIYTLGCVLLDQELQVAKEERETPTTDSMPPLVRQVLELKDHQGAEPAFLFGLELIICGLEKQLKCESGS

SEQ ID NO: 294 - protein, 208 aa, Artificial Sequence
  Sulfonylurea responsive repressor
MGSRLDKSKVINSALELLNEVGIEGLTTRKLAQKLGVEQPTLYWHVKNKRALLDAMAIEMLDRHATHYCPLEGESWQDFLRNNAKSMRCALLSHRDGAKVCLGTGFTEQQYESAENSLAFLCQQGFSLENALYAMQAVGIYTLGCVLLDQELQVAKEERETPTTDSMPPLLRQALELKDHQGAEPAFLFGLELIICGLEKQLKCESGS

SEQ ID NO: 295 - protein, 208 aa, Artificial Sequence
  Sulfonylurea responsive repressor
MGSRLDKSKVINSALELLNEVGIEGLTTRKLAQKLGVEQPTLYWHVKNKRALLDALAIEMLDRHATHYCPLEGESWQDFLRNNAKSMRCALLSHRDGAKVCLGTGFTEKQYESAENSMAFLCQQGFSLEHALYAMQAVGIFTLGCVLLDQELQVAKEERETPTTDSMPPLVRQVLELKDHQGAEPAFLFGLELIICGLEKQLKCESGS

SEQ ID NO: 296 - protein, 208 aa, Artificial Sequence
  Sulfonylurea responsive repressor
MGSRLDKSKVINSALELLNEVGIEGLTTRKLAQKLGVEQPTLYWHVKNKRALLDAMAIEMLDRHATHYCPLEGESWQDFLRNNAKSMRCALLSHRDGAKVCLGTGFTEQQYESAENSMAFLCQQGFSLEHALYAMQAAGIYTLGCVLLNQELQVAKEERETPTTDSMPPLVRQGLELKDHQGAEPAFLFGLELIICGLEKQLKCESGS

SEQ ID NO: 297 - protein, 208 aa, Artificial Sequence
  Sulfonylurea responsive repressor
MGSRLDKSKVINSALELLNEVGIEGLTTRKLAQKLGVEQPTLYWHVKNKRALLDAMAIEMLDSHATHYCPLEGESWQDFLRNNAKSMRCALLSHRDGAKVCLGTGFTEQQYETAENSMAFLCQQGFSLEHAMYAMQAAGIFTLGCVLLDQELQVAKEERETPTTDSMPPLVRQGLELKDHQGAEPAFLFGLELIICGLEKQLKCESGS

SEQ ID NO: 298 - protein, 208 aa, Artificial Sequence
  Sulfonylurea responsive repressor
MGSRLDKSKVINSALELLNEVGIEGLTTRKLAQKLGVEQPTLYWHVKNKRALLDAMAIEMLDRHATHYCPLEGESWPDFLRNNAKSMRCALLSHRDGAKVCLGTGFTEQQYETAENSLAFLCQQGFSLEHALYAMQAVGIYTLGCVLLDQELQVAKEERETPTTDSMPPLLRQGLELKDHQGAEPAFLFGLELIICGLEKQLKCESGS

SEQ ID NO: 299 - protein, 208 aa, Artificial Sequence
  Sulfonylurea responsive repressor
MGSRLDKSKVINSALELLNEVGIEGLTTRKLAQKLGVEQPTLYWHVKNKRALLDAMAIEMLDRHATHYCPLEGESWQDFLRNNAKSMRCALLSHRDGAKVCLGTGFTEQQYESAENSLAFLCQQGFSLENALYAMQAVGIFTLGCVLLDQELQVAKEERETPTTDSMPPLVRQALELKDHQGAEPAFLFGLELIICGLEKQLKCESGS

SEQ ID NO: 300 - protein, 208 aa, Artificial Sequence
  Sulfonylurea responsive repressor
MGSRLDKSKVINSALELLNEVGIEGLTTRKLAQKLGVEQPTLYWHVKNKRALLDALAIEMLDRHATHYCPLEGESWQDFLRNNAKSMRCALLSHRDGAKVCLGTGFTEKQYETAENSLAFLCQQGFSLEHALYAMQAVGIYTLGCVLLDQELQVAKEERETPTTDSMPPLVRQGLELKDHQGAEPAFLFGLELIICGLEKQLKCESGS

SEQ ID NO: 301 - protein, 208 aa, Artificial Sequence
  Sulfonylurea responsive repressor
MGSRLDKSKVINSALELLNEVGIEGLTTRKLAQKLGVEQPTLYWHVKNKRALLDAMAIEMLDRHATHYCPLEGESWQDFLRNNAKSMRCALLSHRDGAKVCLGTGFTEQQYETAENSMAFLCQQGFSLEHALYAMQAVGIYTLGCVLLDQELQVAKEERETPTTDSMPPLVRQGLELKDHQGAEPAFLFGLELIICGLEKQLKCESGS

SEQ ID NO: 302 - protein, 208 aa, Artificial Sequence
  Sulfonylurea responsive repressor
  VARIANT 110, 141, 174: Xaa = Any Amino Acid
MGSRLDKSKVINSALELLNEVGIEGLTTRKLAQKLGVEQPTLYWHVKNKRALLDAMAIEMLDRHATHYCPLEGESWQDFLRNNAKSMRCALLSHRDGAKVCLGTGFTEQXYEAAENSLAFLCQQGFSLEHALYAMQAVGIXTLGCVLLDQELQVAKEERETPTTDSMPPLVRQXLELKDHQGAEPAFLFGLELIICGLEKQLKCESGS

SEQ ID NO: 303 - protein, 208 aa, Artificial Sequence
  Sulfonylurea responsive repressor
MGSRLDKSKVINSALELLNEVGIEGLTTRKLAQKLGVEQPTLYWHVKNKRALLDALAIEMLDRHATHYCPLEGESWQDFLRNNAKSMRCALLSHRDGAKVCLGTGFTEQHYETAENSMAFLCQQGFSLEHAMYAMQAAGIFTLGCVLLDQELQVAKEERETPTTDSMPPLVRQGLELKDHQGAEPAFLFGLELIICGLEKQLKCESGS

SEQ ID NO: 304 - protein, 208 aa, Artificial Sequence
  Sulfonylurea responsive repressor
MGSRLDKSKVINSALELLNEVGIEGLTTRKLAQKLGVEQPTLYWHVKNKRALLDAMAIEMLDRHATHYCPLEGESWQDFLRNNAKSMRCALLSHRDGAKVCLGTGFTEQQYETAENSLAFLCQQGFSLEHAMYAMQAVGIFTLGCVLLDQELQVAKEERETPTTDSMPPLVRQGLELKDHQGAEPAFLFGLELIICGLEKQLKCESGS

SEQ ID NO: 305 - protein, 208 aa, Artificial Sequence
  Sulfonylurea responsive repressor
MGSRLDKSKVINSALELLNEVGIEGLTTRKLAQKLGVEQPTLYWHVKNKRALLDALAIEMLDRHATHYCPLEGESWQDFLRNNAKSMRCALLSHRDGAKVCLGTGFTEKQYETAENSLAFLCQQGFSLENALYAMQAAGIYTLGCVLLDQELQVAKEERETPTTDSMPPLVRQVLELKDHQGAEPAFLFGLELIICGLEKQLKCESGS

SEQ ID NO: 306 - protein, 208 aa, Artificial Sequence
  Sulfonylurea responsive repressor
MGSRLDKSKVINSALELLNEVGIEGLTTRKLAQKLGVEQPTLYWHVKNKRALLDALAIEMLDRHATHYCPLEGESWQDFLRNNAKSMRCALLSHRDGAKVCLGTGFTEQQYEAAENSMAFLCQQGFSLEHAMYAMQAAGIYTLGCVLLDQELQVAKEERETPTTDSMPPLLRQALELKDHQGAEPAFLFGLELIICGLEKQLKCESGS

SEQ ID NO: 307 - protein, 208 aa, Artificial Sequence; identical to SEQ ID NO: 296
  Sulfonylurea responsive repressor

SEQ ID NO: 308 - protein, 208 aa, Artificial Sequence
  Sulfonylurea responsive repressor
  VARIANT 68, 113, 130, 171: Xaa = Any Amino Acid
MGSRLDKSKVINSALELLNEVGIEGLTTRKLAQKLGVEQPTLYWHVKNKRALLDAMAIEMLDRHATHXCPLEGESWQDFLRNNAKSMRCALLSHRDGAKVCLGTGFTEQMYEXAENSMAFLCQQGFSLEXAMYAMQAVGIFTLGCVLLDQELQVAKEERETPTTDSMPPLXRQVLELKDHQGAEPAFLFGLELIICGLEKQLKCESGS

SEQ ID NO: 309 - protein, 208 aa, Artificial Sequence
  Sulfonylurea responsive repressor
MGSRLDKSKVINSALELLNEVGIEGLTTRKLAQKLGVEQPTLYWHVKNKRALLDAMAIEMLDRHATHYCPLEGESWQDFLRNNAKSMRCALLSHRDGAKVCLGTGFTEQQYETAENSLAFLCQQGFSLEHALYAMQAVGIYTLGCVLLDQELQVAKEERETPTTDSMPPLVRQALELKDHQGAEPAFLFGLELIICGLEKQLKCESGS

SEQ ID NO: 310 - protein, 208 aa, Artificial Sequence
  Sulfonylurea responsive repressor
MGSRLDKSKVINSALELLNEVGIEGLTTRKLAQKLGVEQPTLYWHVKNKRALLDAMAIEMLDRHATHYCPLEGESWQDFLRNNAKSMRCALLSHRDGAKVCLGTGFTEQQYETAENSMAFLCQQGFSLEHAMYAMQAACIFTLGCVLLDQELQVAKEERETPTTDSMPPLVRQVLELKDHQGAEPAFLFGLELIICGLEKQLKCESGS

SEQ ID NO: 311 - protein, 208 aa, Artificial Sequence
  Sulfonylurea responsive repressor
MGSRLDKSKVINSALELLNEVGIEGLTTRKLAQKLGVEQPTLYWHVKNKRALLDALAIEMLDRHATHYCPLEGESWQDFLRNNAKSMRCALLSHRDGAKVCLGTGFTEQMYETAENSLAFLCQQGFSLEHALYAMQAVGIFTLGCVLLDQELQVAKEERETPTTDSMPPLVRQGLELKDHQGAEPAFLFGLELIICGLEKQLKCESGS

SEQ ID NO: 312 - protein, 208 aa, Artificial Sequence
  Sulfonylurea responsive repressor
MGSRLDKSKVINSALELLNEVGIEGLTTRKLAQKLGVEQPTLYWHVKNKRALLDAMAIEMLDRHATHMCPLEGESWQDFLRNNAKSMRCALLSHRDGAKVCLGTGFTEQMYESAENSMAFLCQQGFSLENAMYAMQAVGIFTLGCVLLDQELQVAKEERETPTTDSMPPLARQVLELKDHQGAEPAFLFGLELIICGLEKQLKCESGS

SEQ ID NO: 313 - protein, 208 aa, Artificial Sequence
  Sulfonylurea responsive repressor
MGSRLDKSKVINSALELLNEVGIEGLTTRKLAQKLGVEQPTLYWHVKNKRALLDAMAIEMLDRHATHMCPLEGESWQDFLRNNAKSMRCALLSHRDGAKVCLGTGFTEQMYETAENSMAFLCQQGFSLENAMYAMQAAGIYTLGCVLLDQELQVAKEERETPTTDSMPPLVRQVLELKDHQGAEPAFLFGLELIICGLEKQLKCESGS

SEQ ID NO: 314 - protein, 208 aa, Artificial Sequence
  Sulfonylurea responsive repressor
MGSRLDKSKVINSALELLNEVGIEGLTTRKLAQKLGVEQPTLYWHVKNKRALLDALAIEMLDRHATHYCPLEGESWQDFLRNNAKSMRCALLSHRDGAKVCLGTGFTEQMYESAENSLAFLCQQGFSLENAMYAMQAAGIFTLGCVLLDQELQVAKEERETPTTDSMPPLVRQVLELKDHQGAEPAFLFGLELIICGLEKQLKCESGS

SEQ ID NO: 315 - protein, 208 aa, Artificial Sequence
  Sulfonylurea responsive repressor
MGSRLDKSKVINSALELLNEVGIEGLTTRKLAQKLGVEQPTLYWHVKNKRALLDAMAIEMLDRHATHFCPLEGESWQDFLRNNAKSMRCALLSHRDGAKVCLGTGFTEQQYEGAENSMAFLCQQGFSLENAMYAMQAAGIFTLGCVLLDQELQVAKEERETPTTDSMPPLVRQVLELKDHQGAEPAFLFGLELIICGLEKQLKCESGS

SEQ ID NO: 316 - protein, 208 aa, Artificial Sequence
  Sulfonylurea responsive repressor
  VARIANT 6, 82, 110, 130, 174: Xaa = Any Amino Acid
MGSRLXKSKVINSALELLNEVGIEGLTTRKLAQKLGVEQPTLYWHVKNKRALLDALAIEMLDRHATHYCPLEGESWQDFLRXNAKSMRCALLSHRDGAKVCLGTGFTEQXYETAENSLAFLCQQGFSLEXALYAMQAVGIYTLGCVLLDQELQVAKEERETPTTDSMPPLLRQXLELKDHQGAEPAFLFGLELIICGLEKQLKCESGS

SEQ ID NO: 317 - protein, 208 aa, Artificial Sequence
  Sulfonylurea responsive repressor
MGSRLDKSKVINSALELLNEVGIEGLTTRKLAQKLGVEQPTLYWHVKNKRALLDAMAIEMLDRHATHYCPLEGESWQDFLRNNAKSMRCALLSHRDGAKVCLGTGFTEQQYETAENSMAFLCQQGFSLEHALYAMQAAGIYTLGCVLLDQELQVAKEERETPTTDSMPPLLRQGLELKDHQGAEPAFLFGLELIICGLEKQLKCESGS

SEQ ID NO: 318 - protein, 208 aa, Artificial Sequence
  Sulfonylurea responsive repressor
MGSRLDKSKVINSALELLNEVGIEGLTTRKLAQKLGVEQPTLYWHVKNKRALLDAMAIEMLDRHATHYCPLEGESWQDFLRNNAKSMRCALLSHRDGAKVCLGTGFTEQQYETAENSMAFLCQQGFSLENAMYAMQAAGIFTLGCVLLDQELQVAKEERETPTTDSMPPLVRQVLELKDHQGAEPAFLFGLELIICGLEKQLKCESGS

SEQ ID NO: 319 - protein, 208 aa, Artificial Sequence
  Sulfonylurea responsive repressor
MGSRLDKSKVINSALELLNEVGIEGLTTRKLAQKLGVEQPTLYWHVKNKRALLDAMAIEMLDRHATHYCPLEGESWQDFLRNNARSMRCALLSHRDGAKVCLGTGFTEQMYETAENSLAFLCQQGFSLENALYAMQAAGIYTLGCVLLDQELQVAKEERETPTTDSMPPLVRQVLELKDHQGAEPAFLFGLELIICGLEKQLKCESGS

SEQ ID NO: 320 - protein, 208 aa, Artificial Sequence
  Sulfonylurea responsive repressor
MGSRLDKSKVINSALELLNEVGIEGLTTRKLAQKLGVEQPTLYWHVKNKRALLDALAIEMLDRHATHYCPLEGESWQDFLRNNAKSMRCALLSHRDGAKVCLGTGFTEQMYETAENSLAFLCQQGFSLENALYAMQAAGIFTLGCVLLDQELQVAKEERETPTTDSMPPLVRQALELKDHQGAEPAFLFGLELIICGLEKQLKCESGS

SEQ ID NO: 321 - protein, 208 aa, Artificial Sequence
  Sulfonylurea responsive repressor
MGSRLDKSKVINSALELLNEVGIEGLTTRKLAQKLGVEQPTLYWHVKNKRALLDAMAIEMLDRHATHYCPLEGESWQDFLRNNAKSMRCALLSHRDGAKVCLGTGFTEQQYESAENSMAFLCQQGFSLEHAMYAMQAAGIYTLGCVLLDQELQVAKEERETPTTDSMPPLLRQVLELNDHQGAEPAFLFGLELIICGLEKQLKCESGS

SEQ ID NO: 322 - protein, 208 aa, Artificial Sequence; identical to SEQ ID NO: 321
  Sulfonylurea responsive repressor

SEQ ID NO: 323 - protein, 208 aa, Artificial Sequence
  Sulfonylurea responsive repressor
MGSRLDKSKVINSALELLNEVGIEGLTTRKLAQKLGVEQPTLYWHVKNKRALLDAMAFEMLDRHATHYCPLEGESWQDFLRNNAKSMRCALLSHRDGAKVCLGTGFTEQQYETAENSMAFLCQQGFSLENALYAMQAVCIYTLGCVLLDQELQVAKEERETPTTDSMPPLLRQALEIKDHQGAEPAFLFGLELIICGLEKQLKCESGS

SEQ ID NO: 324 - protein, 208 aa, Artificial Sequence
  Sulfonylurea responsive repressor
MGSRLDKSKVINSALELLNEVGIEGLTTRKLAQKLGVEQPTLYWHVKNKRALLDAMAIEMLDRHATHYCPLEGESWQDFLRNNAKSMRCALLSHRDGAKVCLGTGFTEQQYETAENSLAFLCQQGFSLEHALYAMQAVGIYTLGCVLLDQELQVAKEERETPTTDSMPPLVRQGLELKDHQGAEPAFLFGLELIICGLEKQLKCESGS

SEQ ID NO: 325 - protein, 208 aa, Artificial Sequence
  Sulfonylurea responsive repressor
MGSRLDKSKVINSALELLNEVGIEGLTTRKLAQKLGVEQPTLYWHVKNKRALLDALAIEMLDRHATHVCPLEGESWQDFLRNTAKSMRCALLSHRDGAKVCLGTGFTEQQYEAAENSMAFLCQQGFSLEHALYAMQAAGIFTLGCVLLDQELQVAKEERETPTTDSMPPLVRQVLELKDHQGAEPAFLFGLELIICGLEKQLKCESGS

SEQ ID NO: 326 - protein, 208 aa, Artificial Sequence
  Sulfonylurea responsive repressor
MGSRLDKSKVINSALELLNEVGIEGLTTRKLAQKLGVEQPTLYWHVKNKRALLDAMAIEMLDRHATHICPLEGESWQDFLRNNAKSMRCALLSHRDGAKVCLGTGFTEQQYEAAENSLAFLCQQGFSLEHALYAMQAVGIYTLGCVLLDQELQVAKEERETPTTDSMPPLVRQALELKDHQGAEPAFLFGLELIICGLEKQLKCESGS

SEQ ID NO: 327 - protein, 208 aa, Artificial Sequence
  Sulfonylurea responsive repressor
MGSRLDKSKVINSALELLNEVGIEGLTTRKLAQKLGVEQPTLYWHVKNKRALLDALAIEMLDRHATHYCPLEGESWQDFLRNNAKSMRCALLSHRDGAKVCLGTGFTEKQYETAENSLAFLCQQGFSLENALYAMQAVGIFTLGCVLLDQELQVAKEERETPTTDSMPPLVRQALELKDHQGAEPAFLFGLELIICGLEKQLKCESGS

SEQ ID NO: 328 - protein, 208 aa, Artificial Sequence
  Sulfonylurea responsive repressor
MGSRLDKSKVINSALELLNEVGIEGLTTRKLAQKLGVEQPTLYWHVKNKRALLDAMAIEMLDRHATHLCPLEGESWQDFLRNNAKSMRSALLIHRDGAKVCLGTGFTEQQYEAAENSMAFLCQQGFSLENAMYAMQAVGIYTLGCVLLDQELQVAKEERETPTTDRMPPLARQALELKDHQGAEPAFLFGLELIICGLEKQLKCESGS

SEQ ID NO: 329 - protein, 208 aa, Artificial Sequence
  Sulfonylurea responsive repressor
MGSRLDKSKVINSALELLNEVGIEGLTTRKLAQKLGVEQPTLYWHVKNKRALLDAMAIEMLDRHATHYCPLEGESWQDFLRNNAKSMRCALLSHRDGAKVCLGTGFTEQQYEAAENSLAFLCQQGFSLENAMYAMQAAGIYTLGCVLLDQELQVAKEERETPTTDSMPPLVRQGLELKDHQGAEPAFLFGLELIICGLEKQLKCESGS

SEQ ID NO: 330 - protein, 208 aa, Artificial Sequence
  Sulfonylurea responsive repressor
MGSRLDKSKVINSALELLNEVGIEGLTTRKLAQKLGVEQPTLYWHVKNKRALLDAMAIEMLDRHATHYCPLEGESWQDFLRNNAKSMRCALLSHRDGAKVCLGTGFTEQQYEAAENSMAFLCQQGFSLENAMYSMQAVGIFTLGCVLLDQELQVAKEERETPTTDSMPPLVRQGLELKDHQGAEPAFLFGLELIICGLEKQLKCESGS

SEQ ID NO: 331 - protein, 208 aa, Artificial Sequence
  Sulfonylurea responsive repressor
MGSRLDKSKVINSALELLNEVGIEGLTTRKLAQKLGVEQPTLYWHVKNKRALLDALAIEMLDRHATHYCPLEGESWQDFLRNNAKSMRCALLSHRDGAKVCLGTGFTEKQYESAENSLAFLCQQGFSLEHALYAMQAVGIYTLGCVLLDQELQVAKEERETPTTDSMPPLVRQALELKDHQGAEPAFLFGLELIICGFEKQLKCESGS

SEQ ID NO: 332 - protein, 208 aa, Artificial Sequence
  Sulfonylurea responsive repressor
  VARIANT 110, 171: Xaa = Any Amino Acid
MGSRLDKSKVINSALELLNEVGIEGLTTRKLAQKLGVEQPTLYWHVKNKRALLDAMAIEMLDRHATHYCPLEGESWQDFLRNNAKSMRCALLSHRDGAKVCLGTGFTEQXYETAENSMAFLCQQGFSLENALYAMQAAGIYTLGCVLLDQELQVAKEERETPTTDSMPPLXRQALELKDHQGAEPAFLFGLELIICGLEKQLKCESGS

SEQ ID NO: 333 - protein, 208 aa, Artificial Sequence
  Sulfonylurea responsive repressor
MGSRLDKSKVINSALELLNEVGIEGLTTRKLAQKLGVEQPTLYWHVKNKRALLDAMAIEMLDRHATHYCPLEGESWQDFLRNNAKSMRCALLSHRDGAKVCLGTGFTEQQYETAENSMAFLCQQGFSLENAMYAMQAAGIFTLGCVLLDQELRVAKEERETPTTDSMPPLLRQVLELKDHQGAEPAFLFGLELIICGLEKQLKCESGS

SEQ ID NO: 334 - protein, 208 aa, Artificial Sequence
  Sulfonylurea responsive repressor
MGSRLDKSKVINSALELLNEVGIEGLTTRKLAQKLGVEQPTLYWHVKNKRALLDAMAIEMLDRHATHYCPLEGESWQDFLRNNAKSMRCALLSHRDGAKVCLGTGFTEQQYETAENSLAFLCQQGFSLENAMYAMQAVGIFTLGCVLLDQELQVAKEERETPTTDSMPPLLRQVLELKDHQGAEPAFLFGLELIICGLEKQLKCESGS

SEQ ID NO: 335 - protein, 208 aa, Artificial Sequence
  Sulfonylurea responsive repressor
MGSRLDKSKVINSALELLNEVGIEGLTTRKLAQKLGVEQPTLYWHVKNKRALLDAMAIEMLDRHATHYCPLEGESWQDFLRNNAKSMRCALLSHRDGAKVCLGTGFTEQQYEGAENSMAFLCQQGFSLENALYAMQAVGIYTLGCVLLDQELQVAKEERETPTTDSMPSLVRQVLELKDHQGAEPAFLFGLELIICGLEKQLKCESGS

SEQ ID NO: 336 - protein, 208 aa, Artificial Sequence
  Sulfonylurea responsive repressor
  VARIANT 56, 113: Xaa = Any Amino Acid
MGSRLDKSKVINSALELLNEVGIEGLTTRKLAQKLGVEQPTLYWHVKNKRALLDAXAIEMLDRHATHYCPLEGESWQDFLRNNAKSMRCALLSHRDGAKVCLGTGFTEQQYEXAENSLAFLCQQGFSLEHALYAMQAAGIYTLGCVLLDQELQVAKEERETPTTDSMPPLLRQALELKDHQGAEPAFLFGLELIICGLEKQLKCESGS

SEQ ID NO: 337 - protein, 208 aa, Artificial Sequence
  Sulfonylurea responsive repressor
MGSRLDKSKVINSALELLNEVGIEGLTTRKLAQKLGVEQPTLYWHVKNKRALLDALAIEMLDRHATHYCPLEGESWQDFLRNNAKSMRCALLSHRDGAKVCLGTGFTEQMYETAENSMAFLCQQGFSLENAMYAMQAAGIYTLGCVLLDQELQVAKEERETPTTDSMPPLVRQGLELKDHQGAEPAFLFGLELIICGLEKQLKCESGS

SEQ ID NO: 338 - protein, 208 aa, Artificial Sequence; identical to SEQ ID NO: 235
  Sulfonylurea responsive repressor

SEQ ID NO: 339 - protein, 208 aa, Artificial Sequence
  Sulfonylurea responsive repressor
MGSRLDKSKVINSALELLNEVGIEGLTTRKLAQKLGVEQPTLYWHVKNKRALLDALAIEMLDRHATHYCPLEGESWQDFLRNNAKSMRCALLSHRDGAKVCLGTGFTEKQYETAENSMAFLCQQGFSLEHAMYAMQAAGIYTLGCVLLDQELQVAKEERETPTTDSMPPLVRQALELKDHQGAEPAFLFGLELIICGLEKQLKCESGS

SEQ ID NO: 340 - protein, 208 aa, Artificial Sequence
  Sulfonylurea responsive repressor
MGSRLDKSKVINSALELLNEVGIEGLTTRKLAQKLGVEQPTLYWHVKNKRALLDAMAIEMLDRHATHLCPLEGESWQDFLRNNAKSMRCALLSHRDGAKVCLGTGFTEQMYETAENSLAFLCQQGFSLENALYAMQAAGIYTLGCVLLDQELQVAKEERETPTTDSMPPLVRQVLELKDHQGAEPAFLFGLELIICGLEKQLKCESGS

SEQ ID NO: 341 - protein, 208 aa, Artificial Sequence
  Sulfonylurea responsive repressor
  VARIANT 109: Xaa = Any Amino Acid
MGSRLDKSKVINSALELLNEVGIEGLTTRKLAQKLGVEQPTLYWHVKNKRALLDALAIEMLDRHATHYCPLEGESWQDFLRNNAKSMRCALLSHRDGAKVCLGTGFTEXQYEAAENSLAFLCQQGFSLEHALYAMQAVGIYTLGCVLLDQELQVAKEERETPTTDSMPPLVRQALELKDHQGAEPAFLFGLELIICGLEKQLKCESGS

SEQ ID NO: 342 - protein, 208 aa, Artificial Sequence
  Sulfonylurea responsive repressor
MGSRLDKSKVINSALELLNEVGIEGLTTRKLAQKLGVEQPTLYWHVKNKRALLDAMAIEMLDRHATHYCPLEGESWQDFLRNNAKSMRCALLSHRDGAKVCLGTGFTEQQYESAENSLAFLCQQGFSLEHAMYAMQAAGIFTLGCVLLDQELQVAKEERETPTTDSMPPLVRQALELKDHQGAEPAFLFGLELIICGLEKQLKCESGS

SEQ ID NO: 343 - protein, 208 aa, Artificial Sequence; identical to SEQ ID NO: 274
  Sulfonylurea responsive repressor

SEQ ID NO: 344 - protein, 208 aa, Artificial Sequence
  Sulfonylurea responsive repressor
MGSRLDKSKVINSALELLNEVGIEGLTTRKLAQKLGVEQPTLYWHVKNKRALLDALAIEMLDRHATHYCPLEGESWQDFLRNNAKSMRCALLSHRDGAKVCLGTGFTEQMYEAAENSLAFLCQQGFSLEHAMYAMQAVGIYTLGCVLLDQELQVAKEERETPTTDSMPPLVRQGLELKDHQGAEPAFLFGLELIICGLEKQLKCESGS

SEQ ID NO: 345 - protein, 208 aa, Artificial Sequence
  Sulfonylurea responsive repressor
  VARIANT 56, 68, 110, 130, 139, 141: Xaa = Any Amino Acid
MGSRLDKSKVINSALELLNEVGIEGLTTRKLAQKLGVEQPTLYWHVKNKRALLDAXAIEMLDRHATHXCPLEGESWQDFLRNNAKSMRCALLSHRDGAKVCLGTGFTEQXYETAENSLAFLCQQGFSLEXAMYAMQAAXIXTLGCVLLDQELQVAKEERETPTTDSMPPLVRQALELKDHQGAEPAFLFGLELIICGLEKQLKCESGS

SEQ ID NO: 346 - protein, 208 aa, Artificial Sequence
  Sulfonylurea responsive repressor
  VARIANT 171: Xaa = Any Amino Acid
MGSRLDKSKVINSALELLNEVGIEGLTTRKLAQKLGVEQPTLYWHVKNKRALLDAMAIEMLDRHATHYCPLEGESWQDFLRNNAKSMRCALLSHRDGAKVCLGTGFTEQQYESAENSLAFLCQQGFSLENAMYAMQAAGIYTLGCVLLDQELQVAKEERETPTTDSMPPLXRQALELKDHQGAEPAFLFGLELIICGLEKQLKCESGS

SEQ ID NO: 347 - protein, 208 aa, Artificial Sequence
  Sulfonylurea responsive repressor
MGSRLDKSKVINSALELLNEVGIEGLTTRKLAQKLGVEQPTLYWHVKNKRALLDAMAIEMLDRHATHICPLEGESWQDFLRNNAKSMRCALLSHRDGAKVCLGTGFTEQQYETAENSLAFLCQQGFSLEHAMYAMQAAGIYTLGCVLLDQELQVAKEERETPTTDSMPPLVRQVLELKDHQGAEPAFLFGLELIICGLEKQLKCESGS

SEQ ID NO: 348 - protein, 208 aa, Artificial Sequence
  Sulfonylurea responsive repressor
  VARIANT 130: Xaa = Any Amino Acid
MGSRLDKSKVINSALELLNEVGIEGLTTRKLAQKLGVEQPTLYWHVKNKRALLDAMAIEMLDRHATHMCPLEGESWQDFLRNNAKSMRCALLSHRDGAKVCLGTGFTEQQYESAENSMAFLCQQGFSLEXAMYAMQAVGIFTLGCVLLDQELQVAKEERETPTTDSMPPLVRQGLELKDHQGAEPAFLFGLELIICGLEKQLKCESGS

SEQ ID NO: 349 - protein, 208 aa, Artificial Sequence
  Sulfonylurea responsive repressor
MGSRLDKSKVINSALELLNEVGIEGLTTRKLAQKLGVEQPTLYWHVKNKRALLDALAIEMLDRHATHYCPLEGESWQDFLRNNAKSMRCALLSHRDGAKVCLGTGFTEKQYESAENSMAFLCQQGFSLEHALYAMQAVGIYTLGCVLLDQELQVAKEERETPTTDSMPPLVRQGLELKDHQGAEPAFLFGLELIICGLEKQLKCESGS

SEQ ID NO: 350 - protein, 208 aa, Artificial Sequence
  Sulfonylurea responsive repressor
MGSRLDKSKVINSALELLNEVGIEGLTTRKLAQKLGVEQPTLYWHVKNKRALLDAMAIEMLDRHATHYCPLEGESWQDFLRNNAKSMRCALLSHRDGAKVCLGTGFTEQQYEGAENSLAFLCQQGFSLEHAMYAMQAVGIFTLGCVLLDQELQVAKEERETPTTDSMPPLVRQGLELKDHQGAEPAFLFGLELIICGLEKQLKCESGS

SEQ ID NO: 351 - protein, 208 aa, Artificial Sequence
  Sulfonylurea responsive repressor
MGSRLDKSKVINSALELLNEVGIEGLTTRKLAQKLGVEQPTLYWHVKNKRALLDAMAIEMLDRHATHYCPLEGESWQDFLRNNAKSMRCALLSHRDGAKVCLGTGFTEQQYESAENSLAFLCQQGFSLENAMYAMQAVGIFTLGCVLLDQELQVAKEERETPTTDSMPPLLRQVLELKDHQGAEPAFLFGLELIICGLEKQLKCESGS

SEQ ID NO: 352 - protein, 208 aa, Artificial Sequence
  Sulfonylurea responsive repressor
MGSRLDKSKVINSALELLNEVGIEGLTTRKLAQKLGVEQPTLYWHVKNKRALLDAMAIEMLDRHATHICPLEGESWQDFLRNNAKSMRCALLSHRDGAKVCLGTGFTEQQYETAENSLAFLCQQGFSLENAMYAMQAVGIYTLGCVLLDQELQVAKEERETPTTDSMPPLVRQALELKDHQGAEPAFLFGLELIICGLEKQLKCESGS

SEQ ID NO: 353 - protein, 208 aa, Artificial Sequence
  Sulfonylurea responsive repressor
MGSRLDKSKVINSALELLNEVGIEGLTTRKLAQKLGVEQPTLYWHVKNKRALLDAMAIEMLDRHATHYCPLEGESWQDFLRNNAKSMRCALLSQRDGAKVCLGTGFTEQQYEAAENSLAFLCQQGFSLENAMYAMQAVGIFTLGCVLLDQELQVAKEERETPTTDSMPPLVRQALELKDHQGAEPAFLFGLELIICGLEKQLKCESGS

SEQ ID NO: 354 - protein, 208 aa, Artificial Sequence
  Sulfonylurea responsive repressor
MGSRLDKSKVINSALELLNEVGIEGLTTRKLAQKLGVEQPTLYWHVKNKRALLDAMAIEMLDRHATHYCPLEGESWQDFLRNNAKSMRCALLSHRDGAKVCLGTGFTEQQYEGAENSMAFLCQQGFSLENALYAMQAVGIYTLGCVLLDQELQVAKEERETPTTDSMPPLVRQVLELKDHQGAEPAFLFGLELIICGLEKQLKCESGS

SEQ ID NO: 355 - protein, 208 aa, Artificial Sequence
  Sulfonylurea responsive repressor
MGSRLDKSKVINSALELLNEVGIEGLTTRKLAQKLGVEQPTLYWHVKNKRALLDAMAIEMLDRHATHYCPLEGESWQDFLRNNAKSMRCALLSHRDGAKVCLGTGFTEQQYEGAENSMAFLCQQGFSLENAMYAMQAAGIYTLGCVLLDQELQVAKEERETPTTDSMPPLVRQALELKDHQGAEPAFLFGLELIICGLEKQLKCESGS

SEQ ID NO: 356 - protein, 208 aa, Artificial Sequence
  Sulfonylurea responsive repressor
  VARIANT 56, 110, 132, 138: Xaa = Any Amino Acid
MGSRLDKSKVINSALELLNEVGIEGLTTRKLAQKLGVEQPTLYWHVKNKRALLDAXAIEMLDRHATHYCPLEGESWQDFLRNNAKSMRCALLSHRDGAKVCLGTGFTEQXYEAAENSMAFLCQQGFSLEHAXYAMQAXGIYTLGCVLLDQELQVAKEERETPTTDSMPPLVRQVLELKDHQGAEPAFLFGLELIICGLEKQLKCESGS

SEQ ID NO: 357 - protein, 208 aa, Artificial Sequence
  Sulfonylurea responsive repressor
  VARIANT 53, 56, 63, 80, 86, 89, 99, 102, 106, 110, 121, 130, 132,140, 141, 148, 171, 174, 198: Xaa = Any Amino Acid
MGSRLDKSKVINSALELLNEVGIEGLTTRKLAQKLGVEQPTLYWHVKNKRALXDAXAIEMLDXHATHYCPLEGESWQDFXRNNAKXMRXALLSHRDGAXVCXGTGXTEQXYETAENSLAFXCQQGFSLEXAXYAMQAVGXXTLGCVLXDQELQVAKEERETPTTDSMPPLXRQXLELKDHQGAEPAFLFGLELIICGXEKQLKCESGS

SEQ ID NO: 358 - protein, 208 aa, Artificial Sequence; identical to SEQ ID NO: 344
  Sulfonylurea responsive repressor

SEQ ID NO: 359 - protein, 208 aa, Artificial Sequence
  Sulfonylurea responsive repressor
MGSRLDKSKVINSALELLNEVGIEGLTTRKLAQKLGVEQPTLYWHVKNKRALLDAMAIEMLDRHATHYCPLEGESWQDFLRNNAKSMRCALLSHRDGAKVCLGTGFTEQQYEAAENSMAFLCQQGFSLEHALYAMQAACIYTLGCVLLDQELQVAKEERETPTTDSMPPLVRQALELKDHQGAEPAFLFGLELIICGLEKQLKCESGS

SEQ ID NO: 360 - protein, 208 aa, Artificial Sequence; identical to SEQ ID NO: 309
  Sulfonylurea responsive repressor

SEQ ID NO: 361 - protein, 208 aa, Artificial Sequence
  Sulfonylurea responsive repressor
MGSRLDKSKVINSALELLNEVGIEGLTTRKLAQKLGVEQPTLYWHVKNKRALLDAMAIEMLDRHATHYCPLEGESWQDFLRNNAKSMRCALLSHRDGAKVCLGTGFTEQHYESAENSLAFLCQQGFSLEHAMYAMQAVGIYTLGCVLLDQELQVAKEERETPTTDSMPPLVRQALELKDHQGAEPAFLFGLELIICGLEKQLKCESGS

SEQ ID NO: 362 - protein, 208 aa, Artificial Sequence
  Sulfonylurea responsive repressor
  VARIANT 138: Xaa = Any Amino Acid
MGSRLDKSKVINSALELLNEVGIEGLTTRKLAQKLGVEQPTLYWHVKNKRALLDAMAIEMLDRHATHYCPLEGESWQDFLRNNAKSMRCALLSHRDGAKVCLGTGFTEQQYEAAENSMAFLCQQGFSLEHAMYAMQAXGIYTLGCVLLDQELQVAKEERETPTTDSMPPLVRQALELKDHQGAEPAFLFGLELIICGLEKQLKCESGS

SEQ ID NO: 363 - protein, 208 aa, Artificial Sequence
  Sulfonylurea responsive repressor
MGSRLDKSKVINSALELLNEVGIEGLTTRKLAQKLGVEQPTLYWHVKNKRALLDAMAIEMLDRHATHYCPLEGESWQDFLRNNAKSMRCALLSHRDGAKVCLGTGFTEQQYETAENSMAFLCQQGFSLEHAMYAMQAAGIYTLGCVLLDQELQVAKEERETPTTDSMPPLLRQALELKDHQGAEPAFLFGLELIICGLEKQLKCESGS

SEQ ID NO: 364 - protein, 208 aa, Artificial Sequence
  Sulfonylurea responsive repressor
MGSRLDKSKVINSALELLNEVGIEGLTTRKLAQKLGVEQPTLYWHVKNKRALLDAMAIEMLDRHATHFCPLEGESWQDFLRNNAKSMRCALLSHRDGAKVCLGTGFTEQQYETAENSLAFLCQQGFSLENALYAMQAACIYTLGCVLLDQELQVAKEERETPTTDSMPPLVRQALELKDHQGAEPAFLFGLELIICGLEKQLKCESGS

SEQ ID NO: 365 - protein, 208 aa, Artificial Sequence
  Sulfonylurea responsive repressor
MGSRLDKSKVINSALELLNEVGIEGLTTRKLAQKLGVEQPTLYWHVKNKRALLDAMAIEMLDRHATHYCPLEGESWQDFLRNNAKSMRCALLSHRDGAKVCLGTGFTEQQYESAENSMAFLCQQGFSLENAMYAMQAAGIYTLGCVLLDQELQVAKEERETPTTDSMPPLVRQGLELKDHQGAEPAFLFGLELIICGLEKQLKCESGS

SEQ ID NO: 366 - protein, 208 aa, Artificial Sequence
  Sulfonylurea responsive repressor
MGSRLDKSKVINSALELLNEVGIEGLTTRKLAQKLGVEQPTLYWHVKNKRALLDAMAIEMLDRHATHMCPLEGESWQDFLRNNAKSMRCALLSHRDGAKVCLGTGFTEQQYESAENSMAFLCQQGFSLEHAMYAMQAAGIYTLGCVLLDQELQVAKEERETPTTDSMPPLLRQALELKDHQGAEPAFLFGLELIICGLEKQLKCESGS

SEQ ID NO: 367 - protein, 208 aa, Artificial Sequence
  Sulfonylurea responsive repressor
  VARIANT 68, 113, 171, 174: Xaa = Any Amino Acid
MGSRLDKSKVINSALELLNEVGIEGLTTRKLAQKLGVEQPTLYWHVKNKRALLDAMAIEMLDRHATHXCPLEGESWQDFLRNNAKSMRCALLSHRDGAKVCLGTGFTEQQYEXAENSMAFLCQQGFSLENAMYAMQAVGIYTLGCVLLDQELQVAKEERETPTTDSMPPLXRQXLELKDHQGAEPAFLFGLELIICGLEKQLKCESGS

SEQ ID NO: 368 - protein, 208 aa, Artificial Sequence
  Sulfonylurea responsive repressor
MGSRLDKSKVINSALELLNEVGIEGLTTRKLAQKLGVEQPTLYWHVKNKRALLDALAIEMLDRHATHYCPLEGESWQDFLRNNAKSMRCALLSHRDGAKVCLGTGFTEQHYEAAENSMAFLCQQGFSLENAMYAMQAVGIFTLGCVLLDQELQVAKEERETPTTDSMPPLVRQALELKDHQGAEPAFLFGLELIICGLEKQLKCESGS

SEQ ID NO: 369 - protein, 208 aa, Artificial Sequence
  Sulfonylurea responsive repressor
MGSRLDKSKVINSALELLNEVGIEGLTTRKLAQKLGVEQPTLYWHVKNKRALLDALAIEMLDRHATHYCPLEGESWQDFLRNNAKSMRCALLSHRDGAKVCLGTGFTEQMYESAENSMAFLCQQGFSLEHAMYAMQAAGIYTLGCVLLDQELQVAKEERETPTTDSMPPLLRQALELKDHQGAEPAFLFGLELIICGLEKQLKCESGS

SEQ ID NO: 370 - protein, 208 aa, Artificial Sequence
  Sulfonylurea responsive repressor
  VARIANT 110, 113, 141, 171: Xaa = Any Amino Acid
MGSRLDKSKVINSALELLNEVGIEGLTTRKLAQKLGVEQPTLYWHVKNKRALLDAMAIEMLDRHATHYCPLEGESWQDFLRNNAKSMRCALLSHRDGAKVCLGTGFTEQXYEXAENSLAFLCQQGFSLEHALYAMQAACIXTLGCVLLDQELQVAKEERETPTTDSMPPLXRQGLELKDHQGAEPAFLFGLELIICGLEKQLKCESGS

SEQ ID NO: 371 - protein, 208 aa, Artificial Sequence
  Sulfonylurea responsive repressor
MGSRLDKSKVINSALELLNEVGIEGLTTRKLAQKLGVEQPTLYWHVKNKRALLDAMAIEMLDRHATHYCPLEGESWQDFLRNNAKSMRCALLSHRDGAKVCLGTGFTEQQYESAENSMAFLCQQGFSLEHAMYAMQAVGIYTLGCVLLDQELQVAKEERETPTTDSMPPLLRQALELKDHQGAEPAFLFGLELIICGLEKQLKCESGS

SEQ ID NO: 372 - protein, 208 aa, Artificial Sequence
  Sulfonylurea responsive repressor
MGSRLDKSKVINSALELLNEVGIEGLTTRKLAQKLGVEQPTLYWHVKNKRALLDAMAIEMLDRHATHVCPLEGESWQDFLRNNAKSMRCALLSHRDGAKVCLGTGFTEQHYESAENSLAFLCQQGFSLEHALYAMQAVGIYTLGCVLLDQELQVAKEERETPTTDSMPPLVRQALELKDHQGAEPAFLFGLELIICGLEKQLKCESGS

SEQ ID NO: 373 - protein, 208 aa, Artificial Sequence
  Sulfonylurea responsive repressor
MGSRLDKSKVINSALELLNEVGIEGLTTRKLAQKLGVEQPTLYWHVKNKRALLDAMAIEMLDRHATHFCPLEGESWQDFLRNNAKSMRCALLSHRDGAKVCLGTGFTEQQYETAENSLAFLCQQGFSLENAMYAMQAVGIYTLGCVLLDQELQVAKEERETPTTDSMPPLVRQGLELKDHQGAEPAFLFGLELIICGLEKQLKCESGS

SEQ ID NO: 374 - protein, 208 aa, Artificial Sequence
  Sulfonylurea responsive repressor
MGSRLDKSKVINSALELLNEVGIEGLTTRKLAQKLGVEQPTLYWHVKNKRALLDAMAIEMLDRHATHYCPLEGESWQDFLRNNAKSMRCALLSHRDGAKVCLGTGFTEQQYETAENSLAFLCQQGFSLENALYAMQAACIYTLGCVLLDQELQVAKEERETPTTDSMPPLVRQVLELKDHQGAEPAFLFGLELIICGLEKQLKCESGS

SEQ ID NO: 375 - protein, 208 aa, Artificial Sequence
  Sulfonylurea responsive repressor
  VARIANT 8, 9, 10: Xaa = Any Amino Acid
MGSRLDKXXXINSALELLNEVGIEGLTTRKLAQKLGVEQPTLYWHVKNKRALLDAMAIEMLDRHATHYCPLEGESWQDFLRNNAKSMRCALLSHRDGAKVCLGTGFTEQQYDTAENSLAFLCQQGFSLENALYAMQAVGIYTLGCVLLDQELQVAKEERETPTTDSMPPLVRQVLELKDHQGAEPVFLFGLELIICGLEKQLKCESGS

SEQ ID NO: 376 - protein, 208 aa, Artificial Sequence
  Sulfonylurea responsive repressor
MGSRLDKSKVINSALELLNEVGIEGLTTRKLAQKLGVEQPTLYWHVKNKRALLDALAIEMLDRHATHYCPLEGESWQDFLRNNALSMRCALLSHRDGAKVCLGTGFTEKQYETAENSMAFLCQQGFSLEHAMYAMQAAGIYTLGCVLLDQELQVAKEERETPTTDSMPPLVRQALELKDHQGAEPAFLFGLELIICGLEKQLKCESGS

SEQ ID NO: 377 - protein, 208 aa, Artificial Sequence
  Sulfonylurea responsive repressor
MGSRLDKSKVINSALELLNEVGIEGLTTRKLAQKLGVEQPTLYWHVKNKRALLDAMAIEMLDRHATHYCPLEGESWQDFLRNNAKSMRCALLSHRDGAKVCLGTGFTEQQYETAENSLAFLCQQGFSLENAMYAMQAVGIYTLGCVLLDQELQVAKEERETPTTDSMPPLLRQVLELKDHQGAEPAFLFGLELIICGLEKQLKCESGS

SEQ ID NO: 378 - protein, 208 aa, Artificial Sequence
  Sulfonylurea responsive repressor
  VARIANT 7, 8, 9: Xaa = Any Amino Acid
MGSRLDXXXVINSALELLNEVGIEGLTTRKLAQKLGVEQPTLYWHVKNKRALLDAMAIEMLDRHATHYCPLEGESWQDFLRNNAKSMRCALLSHRDGAKVCLGTGFTEQQYEAAENSMAFLCQQGFSLEHAMYAMQAACIYTLGCVLLDQELQVAKEERETPTTDSMPPLVRQALELKDHQGAEPAFLFGLELIICGLEKQLKCESGS

SEQ ID NO: 379 - protein, 208 aa, Artificial Sequence
  Sulfonylurea responsive repressor
  VARIANT 56, 110, 171: Xaa = Any Amino Acid
MGSRLDKSKVINSALELLNEVGIEGLTTRKLAQKLGVEQPTLYWHVKNKRALLDAXAIEMLDRHATHYCPLEGESWQDFLRNNAKSMRCALLSHRDGAKVCLGTGFTEQXYEIAENSLAFLCQQGFSLEHAMYAMQAAGIYTLGCVLLDQELQVAKEERETPTTDSMPPLXRQALELKDHQGAEPAFLFGLELIICGLEKQLKCESGS

SEQ ID NO: 380 - protein, 208 aa, Artificial Sequence
  Sulfonylurea responsive repressor
MGSRLDKSKVINSALELLNEVGIEGLTTRKLAQKLGVEQPTLYWHVKNKRALLDALAIEMLDRHATHYCPLEGESWQDFLRNNAKSMRCALLSHRDGAKVCLGTGFTEKQYEAAENSLAFLCQQGFSLEHALYAMQAVGIYTLGCVLLDQELQVAKEERETPTTDSMPPLVRQVLELKDHQGAEPAFLFGLELIICGLEKQLKCESGS

SEQ ID NO: 381 - protein, 208 aa, Artificial Sequence
  Sulfonylurea responsive repressor
  VARIANT 8, 9, 10, 19: Xaa = Any Amino Acid
MGSRLDKXXXINSALELLXEVGIEGLTTRKLAQKLGVEQPTLYWHVKNKRALLDAMAIEMLDRHATHYCPLEGESWQDFLRNNAKSMRCALLSHRDGAKVCLGTGFTEKLYESAENSLAFLCQQGFSLENAMYAMQAVCIFTLGCVLLDQELQVAKEERETPTTDSMPPLLRQGLELKDHQGAEPAFLFGLELIICGLEKQLKCESGS

SEQ ID NO: 382 - protein, 208 aa, Artificial Sequence
  Sulfonylurea responsive repressor
MGSRLDKSKVINSALELLNEVGIEGLTTRKLAQKLGVEQPTLYWHVKNKRALLDAMAIEMLDRHATHYCPLEGESWQDFLRNNAKSMRCALLSHRDGAKVCLGTGFTEQQYESAENSLAFLCQQGFSLEHAMYAMQAVGIFTLGCVLLDQELQVAKEERETPTTDSMPPLLRQALELKDHQGAEPAFLFGLELIICGLEKQLKCESGS

SEQ ID NO: 383 - protein, 208 aa, Artificial Sequence
  Sulfonylurea responsive repressor
MGSRLDKSKVINSALELLNEVGIEGLTTRKLAQKLGVEQPTLYWHVKNKRALLDALAIEMLDRHATHYCPLEGESWQDFLRNNAKSMRCALLSHRDGAKVCLGTGFTEQMYEGAENSMAFLCQQGFSLEHAMYAMQAAGIYTLGCVLLDQELQVAKEERETPTTDSMPPLVRQALELKDHQGAEPAFLFGLELIICGLEKQLKCESGS

SEQ ID NO: 384 - protein, 208 aa, Artificial Sequence
  Sulfonylurea responsive repressor
  VARIANT 9, 10, 139: Xaa = Any Amino Acid
MGSRLDKSXXINSALELLNEVGIEGLTTRKLAQKLGVEQPTLYWHVKNKRALLDAMAIEMLDRHATHYCPLEGESWQDFLRNNAKSMRCALLSHRDGAKVCLGSGFTEQQYETAENSMAFLCQQGFSLENAMYAMQAAXIFTLGCVLLDQELQVAKEERETPTTDSMPPLVRQVLELKDHQGAEPAFLFGLELIICGLEKQLKCESGS

SEQ ID NO: 385 - protein, 208 aa, Artificial Sequence
  Sulfonylurea responsive repressor
  VARIANT 18, 19, 21: Xaa = Any Amino Acid
MGSRLDKSKVINSALELXXEXGIEGLTTRKLAQKLGVEQPTLYWHVKNKRALLDAMAIEMLDRHATHICPLEEESWQDFLRNNAKSMRCALLSHRDGAKVCLGTGFTEQQYETAENSMAFLCQQGFSLEHAMYAMQAACIYTLGCVLLDQELQVAKEERETPTTDSMPPLVRQVLELKDHQGAEPAFLFGLELIICGLEKQLKCESGS

SEQ ID NO: 386 - protein, 208 aa, Artificial Sequence
  Sulfonylurea responsive repressor
  VARIANT 8, 9, 10: Xaa = Any Amino Acid
MGSRLDKXXXINSALELLNEVGIEGLTTRKLAQKLGVEQPTLYWHVKNKRALLDAMAIEMLDRHATHVCPLEGESWQDFLRNNAKSMRCALLSHRDGAKVCLGTGFTEQQYESAENSLAFLCQQGFSLEHAMYAMQAAGIFTLGCVLLDQELQVAKEERETPTTDSMPPLVRQALELKDHQGAEPAFLFGLELIICGLEKQLKCESGS

SEQ ID NO: 387 - protein, 208 aa, Artificial Sequence
  Sulfonylurea responsive repressor
  VARIANT 6, 7: Xaa = Any Amino Acid
MGSRLXXSKVINSALELLNEVGIEGLTTRKLAQKLGVEQPTLYWHVKNKRALLDAMAIEMLDRHATHMCPLEGESWQDFLRNNAKSMRCALLSHRDGAKVCLGTGFTEQHYETAENSMAFLCQQGFSLENAMYAMQAAGIYTLGCVLLDQELQVAKEERETPTTDSMPPLVRQVLELKDHQGAEPAFLFGLELIICGLEKQLKCESGS

SEQ ID NO: 388 - protein, 208 aa, Artificial Sequence
  Sulfonylurea responsive repressor
  VARIANT 9, 19: Xaa = Any Amino Acid
MGSRLDKSXVINSALELLXEVGIEGLTTRKLAQKLGVEQPTLYWHVKNKRALLDAMAIEMLDRHATHYCPLEGESWQDFLRNNAKSMRCALLSHRDGAKVCLGTGFTEQQYEAAENSLAFLCQQGFSLENALYAMQAVGIFTLGCVLLDQELQVAKEERETPTTDSMPPLVRQGLELKDHQGAEPAFLFGLELIICGLEKQLKCESGS

SEQ ID NO: 389 - protein, 208 aa, Artificial Sequence
  Sulfonylurea responsive repressor
MGSRLDKSKVINSALELLNEVGIEGLTTRKLAQKLGVEQPTLYWHVKNKRALLDAMAIEMLDRHATHYCPLEGESWQDFLRNNAKSMRCALLSHRDGAKVCLGTGFTEQQYESAENSLAFLCQQGFSLENAMYAMQAAGIFTLGCVLLDQELQVAKEERETPTTDSMPPLVRQALELKDHQGAEPAFLFGLELIICGLEKQLKCESGS

SEQ ID NO: 390 - protein, 208 aa, Artificial Sequence
  Sulfonylurea responsive repressor
MGSRLDKSKVINSALELLNEVGIEGLTTRKLAQKLGVEQPTLYWHVKNKRALLDAMAIEMLDRHATHFCPLEGESWQDFLRNNAKSMRCALLSHRDGAKVCLGTGFTEQHYESAENSLAFLCQQGFSLENAMYAMQAVGIYTLGCVLLDQELQVAKEERETPTTDSMPPLVRQVLELKDHQGAEPAFLFGLELIICGLEKQLKCESGS

SEQ ID NO: 391 - protein, 208 aa, Artificial Sequence
  Sulfonylurea responsive repressor
  VARIANT 6: Xaa = Any Amino Acid
MGSRLXKSKVINSALELLNEVGIEGLTTRKLAQKLGVEQPTLYWHVKNKRALLDAMAIEMLDRHATHVCPLEGESWQDFLRNNAKSMRCALLSHRDGAKVCLGTGFTEQQYETAENSLAFLCQQGFSLEHALYAMQAVGIYTLGCVLLDQELQVAKEERETPTTDSMPPLVRQVLELKDHQGAEPAFLFGLELIICGLEKQLKCESGS

SEQ ID NO: 392 - protein, 208 aa, Artificial Sequence
  Sulfonylurea responsive repressor
  VARIANT 5, 6, 7, 9: Xaa = Any Amino Acid
MGSRXXXSXVINSALELLNEVGIEGLTTRKLAQKLGVEQPTLYWHVKNKRALLDALAIEMLDRHATHYCPLEGESWQDFLRNNAKSMRCALLSHRDGAKVCLGTGFTEKQYEAAENSMAFLCQQGFSLEHALYAMQAVGIYTLGCVLLDQELQVAKEERETPTTDSMPPLVRQALELKDHQGAEPAFLFGLELIICGLEKQLKCESGS

SEQ ID NO: 393 - protein, 209 aa, Artificial Sequence
  Sulfonylurea responsive repressor
  VARIANT 6, 7, 8, 9, 10, 209: Xaa = Any Amino Acid
MGSRLXXXXXINSALELLNEVGIEGLTTRKLAQKLGVEQPTLYWHVKNKRALLDAMAIEMLDRHATHYCPLEGESWQDFLRNNAKSMRCALLSHRDGAKVCLGTGFTEQQYESAENSMAFLCQQGFSLENAMYAMQAAGIFTLGCVLLDQELQVAKEERETPTTDSMPPLLRQVLELKDHQGAEPAFLFGLELIICGLEKQLKCESGSX

SEQ ID NO: 394 - protein, 208 aa, Artificial Sequence
  Sulfonylurea responsive repressor
  VARIANT 7, 9, 10, 19: Xaa = Any Amino Acid
MGSRLDXSXXINSALELLXEVGIEGLTTRKLAQKLGVEQPTLYWHVKNKRALLDAMAIEMLDRHATHFCPLEGESWQDFLRNNAKSMRCALLSHRDGAKVCLGTGFTEQQYEAAENSMAFLCQQGFSLENAMYAMQAVGIFTLGCVLLDQELQVAKEERETPTTDSMPPLVRQVLELKDHQGAEPAFLFGLELIICGLEKQLKCESGS

SEQ ID NO: 395 - protein, 208 aa, Artificial Sequence
  Sulfonylurea responsive repressor
  VARIANT 6, 7: Xaa = Any Amino Acid
MGSRLXXSKVINSALELLNEVGIEGLTTRKLAQKLGVEQPTLYWHVKNKRALLDAMAIEMLDRHATHYCPLEGESWQDFLRNNAKSMRCALLSHRDGAKVCLGTGFTEQQYETAENSMAFLCQQGFSLEHAMYAMQAVGIYTLGCVLLDQELQVAKEERETPTTDSMPPLLRQVLELKDHQGAEPAFLFGLELIICGLEKQLKCESGS

SEQ ID NO: 396 - protein, 208 aa, Artificial Sequence
  Sulfonylurea responsive repressor
MGSRLDKSKVINSALELLNEVGIEGLTTRKLAQKLGVEQPTLYWHVKNKRALLDAMAMEMLDRHATHYCPLEGESWQDFLRNNAKSMRCALLSHRDGAKVCLGTGFTEQQYESAENSMAFLCQQGFSLENALYAMQAVGIYTLGCVLLDQELQVAKEERETPTTDSMPPLVRQGLELKDHQGAEPAFLFGLELIICGLEKQLKCESGS

SEQ ID NO: 397 - protein, 208 aa, Artificial Sequence
  Sulfonylurea responsive repressor
  VARIANT 179: Xaa = Any Amino Acid
MGSRLDKSKVINSALELLNEVGIEGLTTRKLAQKLGVEQPTLYWHVKNKRALLDALAIEMLDRHATHYCPLEGESWQDFLRNNAKSMRCALLSHRDGAKVCLGTGFTEQQYEAAENSLAFLCQQGFSLEHALYAMQAAGIYTLGCVLLDQELQVAKEERETPTTDSMPPLLRQGLELKXHQGAEPAFLFGLELIICGLEKQLKCESGS

SEQ ID NO: 398 - protein, 208 aa, Artificial Sequence
  Sulfonylurea responsive repressor
  VARIANT 5, 6, 7, 8, 9: Xaa = Any Amino Acid
MGSRXXXXXVINSALELLNEVGIEGLTTRKLAQKLGVEQPTLYWHVKNKRALLDAMAIEMLDRHATHYCPLEGESWQDFLRNNAKSMRCALLSHRDGAKVCLGTGFTEQQYETAENSLAFLCQQGFSLENAMYAMQAAGIYTLGCVLLDQELQVAKEERETPTTDSMPPLLRQVLELKDHQGAEPAFLFGLELIICGLEKQLKCESGS

SEQ ID NO: 399 - protein, 208 aa, Artificial Sequence; identical to SEQ ID NO: 301
  Sulfonylurea responsive repressor

SEQ ID NO: 400 - protein, 208 aa, Artificial Sequence
  Sulfonylurea responsive repressor
MGSRLDKSKVINSALELLNEVGIEGLTTRKLAQKLGVEQPTLYWHVKNKRALLDAMAIEMLDRHATHYCPLEGESWQDFLRNNAKSMRCALLSHRDGAKVCLGTGFTEQQYETAENSMAFLCQQGFSLENALYAMQAAGIFTLGCVLLDQELQVAKEERETPTTDSMPPLVRQVLELKDHQGAEPAFLFGLELIICGLEKQLKCESGS

SEQ ID NO: 401 - protein, 208 aa, Artificial Sequence
  Sulfonylurea responsive repressor
MGSRLDKSKVINSALELLNEVGIEGLTTRKLAQKLGVEQPTLYWHVKNKRALLDAMAIEMLDRHATHICPLEGESWQDFLRNNAKSMRCALLSHRDGAKVCLGTGFTEQQYETAENSMAFLCQQGFSLENAMYAMQAVCIYTLGCVLLDQELQVAKEERETPTTDSMPPLVRQALELKDHQGAEPAFLFGLELIICGLEKQLKCESGS

SEQ ID NO: 402 - protein, 208 aa, Artificial Sequence
  Sulfonylurea responsive repressor
MGSRLDKSKVINSALELLNEVGIEGLTTRKLAQKLGVEQPTLYWHVKNKRALLDALAIEMMDRHQTHLCPLEGESWQDFLRNNAKSMRCALLSHRDGAKVCLGTRWTEQMYEAAENMLAFLCQQGFSLENALYAVSAVRVFTLGCVLFDQESQVAKEERETPTTASMPPLVRQAWELKDHQGAEPAFLFGLELIICGLEKQLKCESGS

SEQ ID NO: 403 - protein, 208 aa, Artificial Sequence
  Sulfonylurea responsive repressor
  VARIANT 9: Xaa = Any Amino Acid
MGSRLDKSXVINSALELLNEVGIEGLTTRKLAQKLGVEQPTLYWHVKNKRALLDAMAIEMLDRHATHYCPLEGESWQDFLRNNAKSMRCALLSHRDGAKVCLGTGFTEQQYEAAENSLAFLCQQGFSLENALYAMQAVGIFTLGCVLLDQELQVAKEERETPTTDSMPPLVRQGLELKDHQGAEPAFLFGLELIICGLEKQLKCESGS

SEQ ID NO: 404 - protein, 207 aa, Artificial Sequence
  Sulfonylurea responsive repressor
MARLDKSKVINSALELLNEVGIEGLTTRKLAQKLGVEQPTLYWHVKNKRALLDAMAIEMLDRHAPHLSLLEGESWQDFLRNNAKSMRNALLSHRDGAKVCLGTGFTEQNYETAENSLAFLTQQGFSLENALYAWQALGIYTLGCALLDQELQVAKEERETPTTDSMPPLVRQALELKDHQGAEPAFLFGLELIIAGLEKQLKAESGS

SEQ ID NO: 405 - protein, 207 aa, Artificial Sequence
  Sulfonylurea responsive repressor
MARLDKSKVINSALELLNEVGIEGLTTRKLAQKLGVEQPTLYWHVKNKRALLDAMAIEMFDRHKTHYCPLEGESWQDFLRNRAKSMRNALLSHRDGAKVALGTGFTEQQYETMENCLAFLTQQGFSLENALYAMQAVGIYTLGCVLLDQELQVAKEERETPTTDSMPPLVRQAYELRDHQGAEPAFLFGLELIISGLEKQLKAESGS

SEQ ID NO: 406 - protein, 207 aa, Artificial Sequence
  Sulfonylurea responsive repressor
MARLDKSKVINSALELLNEVGIEGLTTRKLAQKLGVEQPTLYWHVKNKRALLDAMAFEMLDRHAIHFLPLEGASWQNFLRNTAKSMRNALLSHRDGAKVCLGTGFTERQYETAENRLAFLTQQGFSLEQALYAWQAVGIYTLGCVLLDQELQVAKEERETPTTDSMPPLVRQAWELKDHQGAEPAFLFGLELIISGLEKQLKAESGS

SEQ ID NO: 407 - protein, 207 aa, Artificial Sequence
  Sulfonylurea responsive repressor
MARLDKSKVINSALELLNEVGIEGLTTRKLAQKLGVEQPTLYWHVKNKRALLDAMAIEMLDRHAIHLLPLEGESWQDFLRNNAKSMRCALLSHRDGAKVCLGTGFTEQQYETAENRLAFLTQQGFSLENALYAWQAVGIYTLGCVLLDQELQVAKEERETPTTDSMPPLVRQALELKDHQGAEPAFLFGLELIIGGLEKQLKSESGS

SEQ ID NO: 408 - protein, 207 aa, Artificial Sequence
  Sulfonylurea responsive repressor
MARLDKSKVINSALELLNEVGIEGLTTRKLAQKLGVEQPTLYWHVKNKRALLDAMAIEMLDRHATHVCPLEGESWQDFLRNNAKIMRCALLSHRDGAKVCLGTGFTEQQYETAENSLAFLCQQGFSLEHALYAMQAAGIFTLGCVLLDQELQVAKEERETPTTDSMPPLVRQALELNDHQGAEPAFLFGLELIICGLEKQLKCESGS

SEQ ID NO: 409 - protein, 207 aa, Artificial Sequence
  Sulfonylurea responsive repressor
MARLDKSKVINSALELLNEVGIEGLTTRKLAQKLGVEQPTLYWHVKNKRALLDAMAIEMLDRHATHYCPLEGESWQDFLRNNAKSMRCALLSHRDGAKVCLGTGFTEQQYETAENSLAFLCQQGFSLENALYAMQAVGIYTLGCVLLDQELQVAKEERETPTTDSMPPLVRQALELKDHQGAEPAFLFGLELIICGLEKQLKCESGS

SEQ ID NO: 410 - protein, 207 aa, Artificial Sequence
  Sulfonylurea responsive repressor
MARLDKSKVINSALELLNEVGIEGLTTRKLAQKLGVEQPTLYWHVKNKRALLDAMAIEMLDRHATHYCPLEGESWQDFLRNNAKSMRCALLSHRDGAKVCLGTGFTEQQYETAENSMAFLCQQGFSLENALYAMQAVGIYTLGCVLLDQELQVAKEERETPTTDSMPPLVRQALELKDHQGAEPAFLFGLELIICGLEKQLKCESGS

SEQ ID NO: 411 - protein, 207 aa, Artificial Sequence
  Sulfonylurea responsive repressor
MARLDKSKVINSALELLNEVGIEGLTTRKLAQKLGVEQPTLYWHVKNKRALLDAMAIEMLDRHATHYCPLEGESWQDFLRNNAKSMRCALLSHRDGAKVCLGTGFTEQQYETAENSLAFLCQQGFSLEHAMYAMQAAGIYTLGCVLLDQELQVAKEERETPTTDSMPPLVRQALELKDHQGAEPAFLFGLELIICGLEKQLKCESGS

SEQ ID NO: 412 - protein, 208 aa, Artificial Sequence
  reverse Sulfonylurea responsive repressor
MGSRLDKSKVINSALELLNEVGIEGLTTRKLAQKLGVEQPTLYWHVKNKRALLDALAIEMLDRHLTHFCPLEGESWQDFLRNNAKSMRCALLSHRDGAKVWLGTGFTEKQYETKENRLAFLCQQGFSLENALYAIRAVSRFTLGCVLQDQEPQVAKEERETPTTDSMPPLLRQAVELFDHQGAEPAFLFGLELIICGLEKQLKCESES

SEQ ID NO: 413 - protein, 208 aa, Artificial Sequence
  reverse Sulfonylurea responsive repressor
MGSRLDKSKVINSALELLNEVGIEGLTTRKLAQKLGVEQPTLYWHVKNKRALLDALAIEMLDRHATHFCPLEGESWQDFLRNNAKSFRCALLSHRDGAKVCLGTAGTEKQYETLENCLAFLCQQGFSLENALYARSAVVCFTLGCVLFDQEMQVAKEERETPTTDSMPPLLRQAAELLDHQGAEPAFLFGLELIICGLEKQLKCESGS

SEQ ID NO: 414 - protein, 208 aa, Artificial Sequence
  reverse Sulfonylurea responsive repressor
MGSRLDKSKVINSALELLNEVGIEGLTTRKLAQKLGVEQPTLYWHVKNKRALLDALAIEMLDRHATHFCPLEGESWQDFLRNTAKSMRCALLSHRDGAKVLLGTATTEKQYETLENLLAFLYQQGFSLENALYAWQAVWRFTLGCVLIDQETQVAKEERETPTTDSMPPLLRQAVELKDHQGAEPAFLFGLELIICGLEKQLKCETGS

SEQ ID NO: 415 - protein, 208 aa, Artificial Sequence
  reverse Sulfonylurea responsive repressor
MGSRLDKSKVINSALELLNEVGIEGLTTRKLAQKLGVEQPTLYWHVKNKRALLDALAIEMLDRHATHFCPLEGESWQDFLRNNAKSMRCALLSHRDGAKVQLGTAATEKQYETLENKLAFLCQQGFSLENALYAHSAVTQFTLGCVLRDQEGQVAKEERETPTTDSMPPLLRQARELRDHQGAEPAFLFGLELIICGLEKQLKCESGS

SEQ ID NO: 416 - protein, 208 aa, Artificial Sequence
  reverse Sulfonylurea responsive repressor
MGSRLDKSKVINSALELLNEVGIEGLTTRKLAQKLGVEQPTLYWHVKNKRALLDALAIEMADRHNTHFCPLEGESWQDFLRNAARSMRCALLSHRDGAKVYLGTARTEKQYETTENVLAFLCQQGFSLENALYAVRAVPRFTLGCVLLDQERQVAKEERETPTTDSMPPLLRQARELTDHQGAEPAFLFGLELIICGLEKQLKCESGS

SEQ ID NO: 417 - protein, 208 aa, Artificial Sequence
  reverse Sulfonylurea responsive repressor
MGSRLDKSKVINSALELLNEVGIEGLTTRKLAQKLGVEQPTLYWHVKNKRALLDALAIEMADRHHTHFCPLEGESWQDFLRNAAKSMRCALLSHRDGAKVRLGTAWTEKQYETHENVLAFLCQQGFSLENALYALKAVSGFTLGCVLKDQEMQVAKEERETPTTDSMPPLLRQATELVDHQGAEPAFLFGLELIICGLEKQLKCESGS

SEQ ID NO: 418 - protein, 208 aa, Artificial Sequence
  reverse Sulfonylurea responsive repressor
MGSRLDKSKVINSALELLNEVGIEGLTTRKLAQKLGVEQPTLYWHVKNKRALLDALAIEMMDRHQTHFCPLEGESWQDFLRNTAKSYRCALLSHRDGAKVILGTRWTEKQYETRENVLAFLCQQGFSLENALYAWAAVGPFTLGCVLRDQERQVAKEERETPTTDSMPPLLRQALELMDHQGAEPAFLFGLELIICGLEKQLKCESGS

SEQ ID NO: 419 - protein, 208 aa, Artificial Sequence
  reverse Sulfonylurea responsive repressor
MGSRLDKSKVINSALELLNEVGIEGLTTRKLAQKLGVEQPTLYWHVKNKRALLDALAIEMLDRNQTHFCPLEGESWQDFLRNNAKSWRCALLSHRDGAKVMLGTRNTEKQYETAENGLAFLCQQGFSLENALYACRAVWTFTLGCVLDDQETQVAKEERETPTSDSMPPLLRQAMELKDHQGAEPAFLFGLELIICGLEKQLKCESGS

SEQ ID NO: 420 - DNA, 627 bp, Artificial Sequence
  Sulfonylurea responsive repressor
atgggatctagattagataaaagtaaagtgattaacagcgcattagagctgcttaatgaggtcggaatcgaaggtttaacaacccgtaaactcgcccagaagctaggtgtagagcagcctacattgtattggcatgtaaaaaataagcgagctctgctcgacgccttagccattgagatgctggataggcacgcgactcacttttgccctttagaaggggaaagctggcaagattttttacgtaataacgctaaaagttttagatgtgctttactaagtcatcgcgatggagcaaaagtatgtttaggtacagcggtgacagaaaaacagtatgaaactatggaaaatattttagcctttttatgccaacaaggtttttcactagagaatgcattatatgcaaggcgcgctgtgattgcgtttactttaggttgcgtattgtgggatcaagagtatcaagtcgctaaagaagaaagggaaacacctactactgatagtatgccgccattattacgacaagctagggaattaattgatcaccaaggtgcagagccagccttcttattcggccttgaattgatcatatgcggattagaaaaacaacttaaatgtgaaagtgggtcttaa

SEQ ID NO: 421 - DNA, 627 bp, Artificial Sequence
  Sulfonylurea responsive repressor
atgggatctagattagataaaagtaaagtgattaacagcgcattagagctgcttaatgaggtcggaatcgaaggtttaacaacccgtaaactcgcccagaagctaggtgtagagcagcctacattgtattggcatgtaaaaaataagcgagctctgctcgacgccttagccattgagatgctggataggcacaatactcacttttgccctttagaaggggaaagctggcaagattttttacgtaataacgctaaaagttggagatgtgctttactaagtcatcgcgatggagcaaaagtagtgttaggtacagcgattacagaaaaacagtatgaaactcacgaaaatccgttagcctttttatgccaacaaggtttttcactagagaatgcattatatgcaatcgccgctgtgcgtaggtttactttaggttgcgtattggtggatcaagagcggcaagtcgctaaagaagaaagggaaacacctactactgatagtatgccgccattattacgacaagctagtgaattacaggatcaccaaggtgcagagccagccttcttattcggccttgaattgatcatatgcggattagaaaaacaacttaaatgtgaaagagggtcttaa

SEQ ID NO: 422 - DNA, 627 bp, Artificial Sequence
  Sulfonylurea responsive repressor
atgggatctagattagataaaagtaaagtgattaacagcgcattagagctgcttaatgaggtcggaatcgaaggtttaacaacccgtaaactcgcccagaagctaggtgtagagcagcctacattgtattggcatgtaaaaaataagcgagctctgctcgacgccttagccattgagatgctggataggcacgcgactcacttttgccctttagaaggggaaagctggcaagattttttacgtaataacgctaaaagtatgagatgtgctttactaagtcatcgcgatggagcaaaagtatgtttaggtacaggctttacagaaaaacagtatgaaactgccgaaaatagtttagcctttttatgccaacaaggtttttcactagagaatgcattatatgcaatgcaggctgtgtgtatttttactttaggttgcgtattgttggatcaagagcttcaagtcgctaaagaagaaagggaaacacctactactgatagtatgccgccattattacgacaagctctggaattaaaggatcaccaaggtgcagagccagccttcttattcggccttgaattgatcatatgcggattagaaaaacaacttaaatgtgaaagtgggtcttaa

SEQ ID NO: 423 - DNA, 627 bp, Artificial Sequence
  Sulfonylurea responsive repressor
atgggatctagattagataaaagtaaagtgattaacagcgcattagagctgcttaatgaggtcggaatcgaaggtttaacaacccgtaaactcgcccagaagctaggtgtagagcagcctacattgtattggcatgtaaaaaataagcgagctctgctcgacgccttagccattgagatgatggataggcaccagactcacttttgccctttagaaggggaaagctggcaagattttttacgtaataacgctaaaagtatgagatgtgctttactaagtcatcgcgatggagcaaaagtatttttaggtacagcgtggacagaaaaacagtatgaaactgtggaaaatctgttagcctttttatgccaacaaggtttttcactagagaatgcattatatgcactcaatgctgtggcgacgtttactttaggttgcgtattgtgggatcaagagaagcaagtcgctaaagaagaaagggaaacacctactactgatagtatgccgccattattacgacaagctcatgaattaggtgatcaccaaggtgcagagccagccttcttattcggccttgaattgatcatatgcggattagaaaaacaacttaaatctgaaagtgggtcttaa

SEQ ID NO: 424 - DNA, 627 bp, Artificial Sequence
  Sulfonylurea responsive repressor
atgggatctagattagataaaagtaaagtgattaacagcgcattagagctgcttaatgaggtcggaatcgaaggtttaacaacccgtaaactcgcccagaagctaggtgtagagcagcctacattgtattggcatgtaaaaaataagcgagctctgctcgacgccttagccattgagatgatggataggcaccatactcacttttgccctttagaaggggaaagctggcaagattttttacgtaatactgctaaaagttatcgatgtgctttactaagtcatcgcgatggagcaaaagtatgtttaggtacagcgattacagaaaaacagtatgaaactaaggaaaataatttagcctttttatgccaacaaggtttttcactagagaatgcattatatgcacggcaggctgtgcgggtgtttactttaggttgcgtattgtttgatcaagagatgcaagtcgctaaagaagaaagggaaacacctactactgatagtatgccgccattattacgacaagcttcggaattactggatcaccaaggtgcagagccagccttcttattcggccttgaattgatcatatgcggattagaaaaacaacttaaatctgaaagtgggtcttaa

SEQ ID NO: 425 - DNA, 627 bp, Artificial Sequence
  Sulfonylurea responsive repressor
atgggatctagattagataaaagtaaagtgattaacagcgcattagagctgcttaatgaggtcggaatcgaaggtttaacaacccgtaaactcgcccagaagctaggtgtagagcagcctacattgtattggcatgtaaaaaataagcgagctctgctcgacgccttagccattgagatgctggataggcacaatactcacttttgccctttagaaggggaaagctggcaagattttttacgtaattctgctaaaagtatgagatgtgctttactaagtcatcgcgatggagcaaaagtattgttaggtacagcggtgacagaaaaacagtatgaaactacggaaaattctttagcctttttatgccaacaaggtttttcactagagaatgcattatatgcaatccgcgctgtgcgtacgtttactttaggttgcgtattggtggatcaagagcggcaagtcgctaaagaagaaagggaaacacctactactgatagtatgccgccattattacgacaagctaaggaattattggatcaccaaggtgcagagccagccttcttattcggccttgaattgatcatatgcggattagaaaaacaacttaaatgtgaaagtgggtcttaa

SEQ ID NO: 426 - DNA, 627 bp, Artificial Sequence
  Sulfonylurea responsive repressor
atgggatctagattagataaaagtaaagtgattaacagcgcattagagctgcttaatgaggtcggaatcgaaggtttaacaacccgtaaactcgcccagaagctaggtgtagagcagcctacattgtattggcatgtaaaaaataagcgagctctgctcgacgccttagccattgagatgctggataggcacgcgactcacttttgccctttagaaggggaaagctggcaagattttttacgtaataacgctaaaagtatgagatgtgctttactaagtcatcgcgatggagcaaaagtatggttaggtacagcgtggacagaaaaacagtatgaaactcccgaaaatgtgttagcctttttatgccaacaaggtttttcactagagaatgcattatatgcatcgcgcgctgtggtaacttttactttaggttgcgtattgactgatcaagagaagcaagtcgctaaagaagaaagggaaacacctactactgatagtatgccgccattattacgacaagcttgggaattacttgatcaccaaggtgcagagccagccttcttattcggccttgaattgatcatatgcggattagaaaaacaacttaaatgtgaaagtgggtcttaa

SEQ ID NO: 427 - DNA, 627 bp, Artificial Sequence
  Sulfonylurea responsive repressor
atgggatctagattagataaaagtaaagtgattaacagcgcattagagctgcttaatgaggtcggaatcgaaggtttaacaacccgtaaactcgcccagaagctaggtgtagagcagcctacattgtattggcatgtaaaaaataagcgagctctgctcgacgccttagccattgagatgatggataggcaccagactcacttttgccctttagaaggggaaagctggcaagattttttacgtaatactgctaaaagtatgagatgtgctttactaagtcatcgcgatggagcaaaagtatggttaggtacacgctggacagaaaaacagtatgaaactcccgaaaatatgttagcctttttatgccaacaaggtttttcactagagaatgcattatatgcatggagcgctgtgtgtaattttactttaggttgcgtattgtcggatcaagagaggcaagtcgctaaagaagaaagggaaacacctactactgatagtatgccgccattattacgacaagcttgggaattatctgatcaccaaggtgcagagccagccttcttattcggccttgaattgatcatatgcggattagaaaaacaacttaaatgtgaaagtgggtcttaa

SEQ ID NO: 428 - DNA, 627 bp, Artificial Sequence
  Sulfonylurea responsive repressor
atgggatctagattagataaaagtaaagtgattaacagcgcattagagctgcttaatgaggtcggaatcgaaggtttaacaacccgtaaactcgcccagaagctaggtgtagagcagcctacattgtattggcatgtaaaaaataagcgagctctgctcgacgccttagccattgagatgctggataggcacgcgactcacttttgccctttagaaggggaaagctggcaagattttttacgtaataacgctaaaagtatgagatgtgctttactaagtcatcgcgatggagcaaaagtaatgttaggtacacgcgctacagaaaaacagtatgaaactgtggaaaatcgtttagcctttttatgccaacaaggtttttcactagagaatgcattatatgcagtgcgcgctgtgcattggtttactttaggttgcgtattgattgatcaagagatgcaagtcgctaaagaagaaagggaaacacctactactgatagtatgccgccattattacgacaagcttatgaattatatgatcaccaaggtgcagagccagccttcttattcggccttgaattgatcatatgcggattagaaaaacaacttaaatgtgaaagtgggtcttaa

SEQ ID NO: 429 - DNA, 627 bp, Artificial Sequence
  Sulfonylurea responsive repressor
atgggatctagattagataaaagtaaagtgattaacagcgcattagagctgcttaatgaggtcggaatcgaaggtttaacaacccgtaaactcgcccagaagctaggtgtagagcagcctacattgtattggcatgtaaaaaataagcgagctctgctcgacgccttagccattgagatggcggataggcaccatactcacttttgccctttagaaggggaaagctggcaagattttttacgtaataacgctaaaagtatgagatgtgctttactaagtcatcgcgatggagcaaaagtatggttaggtacagcgtggacagaaaaacagtatgaaactaccgaaaatatgttagcctttttatgccaacaaggtttttcactagagaatgcattatatgcatggcgcgctgtgacgatgtttactttaggttgcgtattgcgtgatcaagagtggcaagtcgctaaagaagaaagggaaacacctactactgatagtatgccgccattattacgacaagctttggaattaggtgatcaccaaggtgcagagccagccttcttattcggccttgaattgatcatatgcggattagaaaaacaacttaaatgtgaaagtgggtcttaa

SEQ ID NO: 430 - DNA, 627 bp, Artificial Sequence
  Sulfonylurea responsive repressor
atgggatctagattagataaaagtaaagtgattaacagcgcattagagctgcttaatgaggtcggaatcgaaggtttaacaacccgtaaactcgcccagaagctaggtgtagagcagcctacattgtattggcatgtaaaaaataagcgagctctgctcgacgccttagccattgagatgctggataggcacgcgactcacttttgccctttagaaggggaaagctggcaagattttttacgtaataacgctaaaagttatagatgtgctttactaagtcatcgcgatggagcaaaagtatatttaggtacagcggtgacagaaaaacagtatgaaactgccgaaaatcagttagcctttttatgccaacaaggtttttcactagagaatgcattatatgcagtgaaggctgtggcggggtttactttaggttgcgtattgtgggatcaagagtctcaagtcgctaaagaagaaagggaaacacctactactgctagtatgccgccattattacgacaagctgtggaattagcggatcaccaaggtgcagagccagccttcttattcggccttgaattgatcatatgcggattagaaaaacaacttaaatgtgaaagtgggtcttaa

SEQ ID NO: 431 - DNA, 627 bp, Artificial Sequence
  Sulfonylurea responsive repressor
atgggatctagattagataaaagtaaagtgattaacagcgcattagagctgcttaatgaggtcggaatcgaaggtttaacaacccgtaaactcgcccagaagctaggtgtagagcagcctacattgtattggcatgtaaaaaataagcgagctctgctcgacgccttagccattgagatgatggataggcacgcaactcacatttgccctttagaaggggaaagctggcaagattttttacgtaataatgctaaaagtatgagatgtgctttactaagccatcgcgatggagcaaaagtatgtttaggtacacgctggacagaacaacaatatgaagctgctgaaaatatgttagcctttttatgccaacaaggtttttcactagagaatgcattatatgcagtgagtgctgtgagggtgtttactttaggttgcgtattgtttgatcaagagagccaagtcgctaaagaagaaagggaaacacctactactgctagtatgccgccattattgcgacaagcttgggaattaaaggatcaccaaggtgcagagccagccttcttattcggccttgaattgatcatatgcggattagaaaaacaacttaaatgcgaaagtgggtcttaa

SEQ ID NO: 432 - DNA, 627 bp, Artificial Sequence
  Sulfonylurea responsive repressor
  misc_feature 240, 427: n = A,T,C or G
atgggatctagattagataaaagtaaagtgattaacagcgcattagagctgcttaatgaggtcggaatcgaaggtttaacaacccgtaaactcgcccagaagctaggtgtagagcagcctacattgtattggcatgtaaaaaataagcgagctctgctcgacgccttagccattgagatgatggataggcaccaaactcactattgccctttagaaggggaaagctggcaagattttttncgtaataatgctaaaagtatgagatgtgctttactaagccatcgcgatggagcaaaagtatgtttaggtacacgctggacagaacaacaatatgaaagtgctgaaaatatgttagcctttttatgccaacaaggtttttcactagagaatgcattatatgcaatgagtgctgtgagggtgtttactntaggttgcgtattgtttgatcaagagagccaagtcgctaaagaagaaagggaaacacctactactgctagtatgccgccattattgcgacaagcttgggaattaaaggatcaccaaggtgcagagccagccttcttattcggccttgaattgatcatatgcggattagaaaaacaacttaaatgcgaaagtgggtcttaa

SEQ ID NO: 433 - DNA, 627 bp, Artificial Sequence
  Sulfonylurea responsive repressor
atgggatctagattagataaaagtaaagtgattaacagcgcattagagctgcttaatgaggtcggaatcgaaggtttaacaacccgtaaactcgcccagaagctaggtgtagagcagcctacattgtattggcatgtaaaaaataagcgagctctgctcgacgccttagccattgagatgatggataggcaccaaactcacttttgccctttagaaggggaaagctggcaagattttttacgtaataatgctaaaagtatgagatgtgctttactaagccatcgcgatggagcaaaagtatgtttaggtacacgctggacagaaaaacaatatgaaactgctgaaaatatgttagcctttttatgccaacaaggtttttcactagagaatgcattatatgcaatgagtgctgtgagggtgtttactttaggttgcgtattgtttgatcaagagctccaagtcgctaaagaagaaagggaaacacctactactgctagtatgccgccattagtgcgacaagtttgggaattaaaggatcaccaaggtgcagagccagccttcttattcggccttgaattgatcatatgcggattagaaaaacaacttaaatgcgaaagtgggtcttaa

SEQ ID NO: 434 - DNA, 627 bp, Artificial Sequence
  Sulfonylurea responsive repressor
atgggatctagattagataaaagtaaagtgattaacagcgcattagagctgcttaatgaggtcggaatcgaaggtttaacaacccgtaaactcgcccagaagctaggtgtagagcagcctacattgtattggcatgtaaaaaataagcgagctctgctcgacgccttagccattgagatgatggataggcacgcaactcactattgccctttagaaggggaaagctggcaagattttttacgtaataatgctaaaagtatgagatgtgctttactaagccatcgcgatggagcaaaagtatgtttaggtacacgctggacagaaaaacattatgaaactgctgaaaatatgttagcctttttatgccaacaaggtttttcactagagaatgcattatatgcagtgagtgctgtgagggtgtttactttaggttgcgtattgtttgatcaagagagccaagtcgctaaagaagaaagggaaacacctactactgctagtatgccgccattattgcgacaagcttgggaattaaaggatcaccaaggtgcagagccagccttcttattcggccttgaattgatcatatgcggattagaaaaacaacttaaatgcgaaagtgggtcttaa

SEQ ID NO: 435 - DNA, 627 bp, Artificial Sequence
  Sulfonylurea responsive repressor
atgggatctagattagataaaagtaaagtgattaacagcgcattagagctgcttaatgaggtcggaatcgaaggtttaacaacccgtaaactcgcccagaagctaggtgtagagcagcctacattgtattggcatgtaaaaaataagcgagctctgctcgacgccttagccattgagatgatggataggcacgcaactcactattgccctttagaaggggaaagctggcaagattttttacgtaatactgctaaaagtatgagatgtgctttactaagccatcgcgatggagcaaaagtatgtttaggtacacgctggacagaacaacaatatgaaagtgctgaaaatatgttagcctttttatgccaacaaggtttttcactagagaatgcattatatgcagtgagtgctgtgagggtgtttactttaggttgcgtattgtttgatcaagagagccaagtcgctaaagaagaaagggaaacacctactactgctagtatgccgccattagtgcgacaaggttgggaattaaaggatcaccaaggtgcagagccagccttcttattcggccttgaattgatcatatgcggattagaaaaacaacttaaatgcgaaagtgggtcttaa

SEQ ID NO: 436 - DNA, 627 bp, Artificial Sequence
  Sulfonylurea responsive repressor
atgggatctagattagataaaagtaaagtgattaacagcgcattagagctgcttaatgaggtcggaatcgaaggtttaacaacccgtaaactcgcccagaagctaggtgtagagcagcctacattgtattggcatgtaaaaaataagcgagctctgctcgacgccttagccattgagatgatggataggcaccaaactcactattgccctttagaaggggaaagctggcaagattttttacgtaataatgctaaaagtatgagatgtgctttactaagccatcgcgatggagcaaaagtatgtttaggtacacgctggacagaacaattgtatgaaactgctgaaaatatgttagcctttttatgccaacaaggtttttcactagagaatgcattatatgcagtgagtgctgtgagggtgtttactttaggttgcgtattgtttgatcaagagctccaagtcgctaaagaagaaagggaaacccctactactgctagtatgccgccattattgcgacaagcttgggaattaaaggatcaccaaggtgcagagccagccttcttattcggccttgaattgatcatatgcggattagaaaaacaacttaaatgcgaaagtgggtcttaa

SEQ ID NO: 437 - DNA, 627 bp, Artificial Sequence
  Sulfonylurea responsive repressor
atgggatctagattagataaaagtaaagtgattaacagcgcattagagctgcttaatgaggtcggaatcgaaggtttaacaacccgtaaactcgcccagaagctaggtgtagagcagcctacattgtattggcatgtaaaaaataagcgagctctgctcgacgccttagccattgagatgatggataggcacgcaactcactattgccctttagaaggggaaagctggcaagattttttacgtaataatgctaaaagtatgagatgtgctttactaagccatcgcgatggagcaaaagtatgtttaggtacacgctggacagaacaacaatatgaaactgctgaaaatatgttagcctttttatgccaacaaggtttttcactagagaatgcattatatgcaatgagtgctgtgagggtgtttactttaggttgcgtattgtttgatcaagagagccaagtcgctaaagaagaaagggaaacacctactactgctagtatgccgccattattgcgacaagtttgggaattaaaggatcaccaaggtgcagagccagccttcttattcggccttgaattgatcatatgcggattagaaaaacaacttaaatgcgaaagtgggtcttaa

SEQ ID NO: 438 - DNA, 627 bp, Artificial Sequence
  Sulfonylurea responsive repressor
atgggatctagattagataaaagtaaagtgattaacagcgcattagagctgcttaatgaggtcggaatcgaaggtttaacaacccgtaaactcgcccagaagctaggtgtagagcagcctacattgtattggcatgtaaaaaataagcgagctctgctcgacgccttagccattgagatgatggataggcaccaaactcacgtttgccctttagaaggggaaagctggcaagattttttacgtaataatgctaaaagtatgagatgtgctttactaagccatcgcgatggagcaaaagtatgtttaggtacacgctggacagaacaattgtatgaaactgctgaaaatcaattagcctttttatgccaacaaggtttttcactagagaatgcattatatgcaatgagtgctgtgagggtgtttactttaggttgcgtattgtttgatcaagagctccaagtcgctaaagaagaaagggaaacacctactactgctagtatgccaccattattgcgacaagtttgggaattaaaggatcaccaaggtgcagagccagccttcttattcggccttgaattgatcatatgcggattagaaaaacaacttaaatgcgaaagtgggtcttaa

SEQ ID NO: 439 - DNA, 627 bp, Artificial Sequence
  Sulfonylurea responsive repressor
atgggatctagattagataaaagtaaagtgattaacagcgcattagagctgcttaatgaggtcggaatcgaaggtttaacaacccgtaaactcgcccagaagctaggtgtagagcagcctacattgtattggcatgtaaaaaataagcgagctctgctcgacgccttagccattgagatgatggataggcaccaaactcacatttgccctttagaaggggaaagctggcaagattttttacgtaatactgctaaaagtatgagatgtgctttactaagccatcgcgatggagcaaaagtatgtttaggtacacgctggacagaacaacattatgaaactgctgaaaatcaattagcctttttatgccaacaaggtttttcactagagaatgcattatatgcaatgagtgctgtgagggtgtttactttaggttgcgtattgtttgatcaagagagccaagtcgctaaagaagaaagggaaacacctactactgctagtatgccgccattagtgcgacaagcttgggaattaaaggatcaccaaggtgcagagccagccttcttattcggccttgaattgatcatatgcggattagaaaaacaacttaaatgcgaaagtgggtcttaa

SEQ ID NO: 440 - DNA, 627 bp, Artificial Sequence
  Sulfonylurea responsive repressor
atgggatctagattagataaaagtaaagtgattaacagcgcattagagctgcttaatgaggtcggaatcgaaggtttaacaacccgtaaactcgcccagaagctaggtgtagagcagcctacattgtattggcatgtaaaaaataagcgagctctgctcgacgccttagccattgagatgatggataggcaccaaactcacgtgtgccctttagaaggggaaagctggcaagattttttacgtaataatgctaaaagtatgagatgtgctttactaagccatcgcgatggagcaaaagtatgtttaggtacacgctggacagaaaaacaatatgaagctgctgaaaatatgttagcctttttatgccaacaaggtttttcactagagaatgcattatatgcagtgagtgctgtgagggtgtttactttaggttgcgtattgtttgatcaagagagccaagtcgctaaagaagaaagggaaacacctactactgctagtatgccgccattattgcgacaaggttgggaattaaaggatcaccaaggtgcagagccagccttcttattcggccttgaattgatcatatgcggattagaaaaacaacttaaatgcgaaagtgggtcttaa

SEQ ID NO: 441 - DNA, 627 bp, Artificial Sequence
  Sulfonylurea responsive repressor
atgggatctagattagataaaagtaaagtgattaacagcgcattagagctgcttaatgaggtcggaatcgaaggtttaacaacccgtaaactcgcccagaagctaggtgtagagcagcctacattgtattggcatgtaaaaaataagcgagctctgctcgacgccttagccattgagatgatggataggcaccaaactcactattgccctttagaaggggaaagctggcaagattttttacgtaatactgctaaaagtatgagatgtgctttactaagccatcgcgatggagcaaaagtatgtttaggtacacgctggacagaacaacattatgaaactgctgaaaatatgttagcctttttatgccaacaaggtttttcactagagaatgcattatatgcaatgagtgctgtgagggtgtttactttaggttgcgtattgtttgatcaagagctccaagtcgctaaagaagaaagggaaacacctactactgctagtatgccgccattagtgcgacaagtttgggaattaaaggatcaccaaggtgcagagccagccttcttattcggccttgaattgatcatatgcggattagaaaaacaacttaaatgcgaaagtgggtcttaa

SEQ ID NO: 442 - DNA, 627 bp, Artificial Sequence
  Sulfonylurea responsive repressor
atgggatctagattagataaaagtaaagtgattaacagcgcattagagctgcttaatgaggtcggaatcgaaggtttaacaacccgtaaactcgcccagaagctaggtgtagagcagcctacattgtattggcatgtaaaaaataagcgagctctgctcgacgccttagccattgagatgatggataggcaccaaactcacgtgtgccctttagaaggggaaagctggcaagattttttacgtaataatgctaaaagtatgagatgtgctttactaagccatcgcgatggagcaaaagtatgtttaggtacacgctggacagaacaattgtatgaaactgctgaaaatcaattagcctttttatgccaacaaggtttttcactagagaatgcattatatgcaatgagtgctgtgaggaactttactttaggttgcgtattgtttgatcaagagagccaagtcgctaaagaagaaagggaaacacctactactgctagtatgccgccattagtgcgacaagcttgggaattaaaggatcaccaaggtgcagagccagccttcttattcggccttgaattgatcatatgcggattagaaaaacaacttaaatgcgaaagtgggtcttaa

SEQ ID NO: 443 - DNA, 627 bp, Artificial Sequence
  Sulfonylurea responsive repressor
atgggatctagattagataaaagtaaagtgattaacagcgcattagagctgcttaatgaggtcggaatcgaaggtttaacaacccgtaaactcgcccagaagctaggtgtagagcagcctacattgtattggcatgtaaaaaataagcgagctctgctcgacgccttagccattgagatgatggataggcaccaaactcactattgccctttagaaggggaaagctggcaagattttttacgtaataatgctaaaagtatgagatgtgctttactaagccatcgcgatggagcaaaagtatgtttaggtacacgctggacagaacaattgtatgaaactgctgaaaatatgttagcctttttatgccaacaaggtttttcactagagaatgcattatatgcagtgagtgctgtgagggtgtttactttaggttgcgtattgtttgatcaagagagccaagtcgctaaagaagaaagggaaacacctactactgctagtatgccgccattagtgcgacaagtttgggaattaaaggatcaccaaggtgcagagccagccttcttattcggccttgaattgatcatatgcggattagaaaaacaacttaaatgcgaaagtgggtcttaa

SEQ ID NO: 444 - DNA, 627 bp, Artificial Sequence
  Sulfonylurea responsive repressor
atgggatctagattagataaaagtaaagtgattaacagcgcattagagctgcttaatgaggtcggaatcgaaggtttaacaacccgtaaactcgcccagaagctaggtgtagagcagcctacattgtattggcatgtaaaaaataagcgagctctgctcgacgccttagccattgagatgatggataggcacgcaactcacgtttgccctttagaaggggaaagctggcaagattttttacgtaataatgctaaaagtatgagatgtgctttactaagccatcgcgatggagcaaaagtatgtttaggtacacgctggacagaacaaatgtatgaaactgctgaaaatcaattagcctttttatgccaacaaggtttttcactagagaatgcattatatgcaatgagtgctgtgagggtgtttactttaggttgcgtattgtttgatcaagagagccaagtcgctaaagaagaaagggaaacacctactactgctagtatgccgccattagtgcgacaagcttgggaattaaaggatcaccaaggtgcagagccagccttcttattcggccttgaattgatcatatgcggattagaaaaacaacttaaatgcgaaagtgggtcttaa

SEQ ID NO: 445 - DNA, 626 bp, Artificial Sequence
  Sulfonylurea responsive repressor
atgggatctagattagataaaagtaaagtgattaacagcgcattagagctgcttaatgaggtcggaatcgaaggtttaacaacccgtaaactcgcccagaagctaggtgtagagcagcctacattgtattggcatgtaaaaaataagcgagctctgctcgacgccttagccattgagatgatggataggcaccaaactcacgtgtgccctttagaaggggaaagctggcaagattttttacgtaataatgctaaaagtatgagatgtgctttactaagccatcgcgatggagcaaaagtatgtttaggtacacgctggacagaaaaacaatatgaaagtgctgaaaatatgttagcctttttatgccaacaaggtttttcactagagaatgcattatatgcagtgagtgctgtgagggtgtttactttaggttgcgtattgtttgatcaagagctccaagtcgctaaagaagaaagggaaacacctactactgctagtatgccgccattattgcgacaaggttgggaattaaatgatcaccaaggtgcagagccagccttcttattcggccttgaattgatcatatgcggattagaaaaacaacttaaatgcgaaagtgggtctaa

SEQ ID NO: 446 - DNA, 627 bp, Artificial Sequence
  Sulfonylurea responsive repressor
atgggatctagattagataaaagtaaagtgattaacagcgcattagagctgcttaatgaggtcggaatcgaaggtttaacaacccgtaaactcgcccagaagctaggtgtagagcagcctacattgtattggcatgtaaaaaataagcgagctctgctcgacgccttagccattgagatgatggataggcaccaaactcactattgccctttagaaggggaaagctggcaagattttttacgtaataatgctaaaagtatgagatgtgctttactaagccatcgcgatggagcaaaagtatgtttaggtacacgctggacagaacaacattatgaaggtgctgaaaatatgttagcctttttatgccaacaaggtttttcactagagaatgcattatatgcaatgagtgctgtgagggtgtttactttaggttgcgtattgtttgatcaagagctccaagtcgctaaagaagaaagggaaacacctactactgctagtatgccgccattagtgcgacaagtttgggaattaaaggatcaccaaggtgcagagccagccttcttattcggccttgaattgatcatatgcggattagaaaaacaacttaaatgcgaaagtgggtcttaa

SEQ ID NO: 447 - DNA, 627 bp, Artificial Sequence
  Sulfonylurea responsive repressor
  misc_feature 455: n = A,T,C or G
atgggatctagattagataaaagtaaagtgattaacagcgcattagagctgcttaatgaggtcggaatcgaaggtttaacaacccgtaaactcgcccagaagctaggtgtagagcagcctacattgtattggcatgtaaaaaataagcgagctctgctcgacgccttagccattgagatgatggataggcacgcaactcacgtttgccctttagaaggggaaagctggcaagattttttacgtaataatgctaaaagtatgagatgtgctttactaagccatcgcgatggagcaaaagtatgtttaggtacacgctggacagaacaaatgtatgaaactgctgaaaatcaattagcctttttatgccaacaaggtttttcactagagaatgcattatatgcaatgagtgctgtgagggtgtttactttaggttgcgtattgtttgatcaagaganccaagtcgctaaagaagaaagggaaacacctactactgctagtatgccgccattattgcgacaagtttgggaattaaaggatcaccaaggtgcagagccagccttcttattcggccttgaattgatcatatgcggattagaaaaacaacttaaatgcgaaagtgggtcttaa

SEQ ID NO: 448 - DNA, 627 bp, Artificial Sequence
  Sulfonylurea responsive repressor
atgggatctagattagataaaagtaaagtgattaacagcgcattagagctgcttaatgaggtcggaatcgaaggtttaacaacccgtaaactcgcccagaagctaggtgtagagcagcctacattgtattggcatgtaaaaaataagcgagctctgctcgacgccttagccattgagatgatggataggcacgcaactcactattgccctttagaaggggaaagctggcaagattttttacgtaatactgctaaaagtatgagatgtgctttactaagccatcgcgatggagcaaaagtatgtttaggtacacgctggacagaaaaacaatatgaaactgctgaaaatcaattagcctttttatgccaacaaggtttttcactagagaatgcattatatgcaatgagtgctgtgagggtgtttactttaggttgcgtattgtttgatcaagagctccaagtcgctaaagaagaaagggaaacacctactactgctagtatgccgccattagtgcgacaagtttgggaattaaaggatcaccaaggtgcagagccagccttcttattcggccttgaattgatcatatgcggattagaaaaacaacttaaatgcgaaagtgggtcttaa

SEQ ID NO: 449 - DNA, 627 bp, Artificial Sequence
  Sulfonylurea responsive repressor
  misc_feature 193: n = A,T,C or G
atgggatctagattagataaaagtaaagtgattaacagcgcattagagctgcttaatgaggtcggaatcgaaggtttaacaacccgtaaactcgcccagaagctaggtgtagagcagcctacattgtattggcatgtaaaaaataagcgagctctgctcgacgccttagccattgagatgatggataggcacncaactcactattgccctttagaaggggaaagctggcaagattttttacgtaatactgctaaaagtatgagatgtgctttactaagccatcgcgatggagcaaaagtatgtttaggtacacgctggacagaaaaacaatatgaaactgctgaaaatcaattagcctttttatgccaacaaggtttttcactagagaatgcattatatgcaatgagtgctgtgagggtgtttactttaggttgcgtattgtttgatcaagagagccaagtcgctaaagaagaaagggaaacacctactactgctagtatgccgccattagtgcgacaaggttgggaattaaaggatcaccaaggtgcagagccagccttcttattcggccttgaattgatcatatgcggattagaaaaacaacttaaatgcgaaagtgggtcttaa

SEQ ID NO: 450 - DNA, 627 bp, Artificial Sequence
  Sulfonylurea responsive repressor
atgggatctagattagataaaagtaaagtgattaacagcgcattagagctgcttaatgaggtcggaatcgaaggtttaacaacccgtaaactcgcccagaagctaggtgtagagcagcctacattgtattggcatgtaaaaaataagcgagctctgctcgacgccttagccattgagatgatggataggcaccaaactcacatgtgccctttagaaggggaaagctggcaagattttttacgtaataatgctaaaagtatgagatgtgctttactaagccatcgcgatggagcaaaagtatgtttaggtacacgctggacagaaaaacattatgaaactgctgaaaatatgttagcctttttatgccaacaaggtttttcactagagaatgcattatatgcagtgagtgctgtgagggtgtttactttaggttgcgtattgtttgatcaagagagccaagtcgctaaagaagaaagggaaacacctactactgctagtatgccgccattagtgcgacaaggttgggaattaaaggatcaccaaggtgcagagccagccttcttattcggccttgaattgatcatatgcggattagaaaaacaacttaaatgcgaaagtgggtcttaa

SEQ ID NO: 451 - DNA, 627 bp, Artificial Sequence
  Sulfonylurea responsive repressor
atgggatctagattagataaaagtaaagtgattaacagcgcattagagctgcttaatgaggtcggaatcgaaggtttaacaacccgtaaactcgcccagaagctaggtgtagagcagcctacattgtattggcatgtaaaaaataagcgagctctgctcgacgccttagccattgagatgatggataggcaccaaactcacttgtgccctttagaaggggaaagctggcaagattttttacgtaataatgctaaaagtatgagatgtgctttactaagccatcgcgatggagcaaaagtatgtttaggtacacgctggacagaaaaacaatatgaaagtgctgaaaatatgttagcctttttatgccaacaaggtttttcactagagaatgcattatatgcaatgagtgctgtgagggtgtttactttaggttgcgtattgtttgatcaagagagccaagtcgctaaagaagaaagggaaacacctactactgctagtatgccgccattagtgcgacaagtttgggaattaaaggatcaccaaggtgcagagccagccttcttattcggccttgaattgatcatatgcggattagaaaaacaacttaaatgcgaaagtgggtcttaa

SEQ ID NO: 452 - DNA, 627 bp, Artificial Sequence
  Sulfonylurea responsive repressor
atgggatctagattagataaaagtaaagtgattaacagcgcattagagctgcttaatgaggtcggaatcgaaggtttaacaacccgtaaactcgcccagaagctaggtgtagagcagcctacattgtattggcatgtaaaaaataagcgagctctgctcgacgccttagccattgagatgatggataggcaccaaactcactattgccctttagaaggggaaagctggcaagattttttacgtaatactgctaaaagtatgagatgtgctttactaagccatcgcgatggagcaaaagtatgtttaggtacacgctggacagaaaaacattatgaaactgctgaaaatcaattagcctttttatgccaacaaggtttttcactagagaatgcattatatgcagtgagtgctgtgagggtgtttactttaggttgcgtattgtttgatcaagagagccaagtcgctaaagaagaaagggaaacacctactactgctagtatgccgccattagtgcgacaagtttgggaattaaaggatcaccaaggtgcagagccagccttcttattcggccttgaattgatcatatgcggattagaaaaacaacttaaatgcgaaagtgggtcttaa

SEQ ID NO: 453 - DNA, 627 bp, Artificial Sequence
  Sulfonylurea responsive repressor
atgggatctagattagataaaagtaaagtgattaacagcgcattagagctgcttaatgaggtcggaatcgaaggtttaacaacccgtaaactcgcccagaagctaggtgtagagcagcctacattgtattggcatgtaaaaaataagcgagctctgctcgacgccttagccattgagatgatggataggcaccaaactcactattgccctttagaaggggaaagctggcaagattttttacgtaatactgctaaaagtatgagatgtgctttactaagccatcgcgatggagcaaaagtatgtttaggtacacgctggacagaacaattgtatgaaactgctgaaaatcaattagcctttttatgccaacaaggtttttcactagagaatgcattatatgcaatgagtgctgtgagggtgtttactttaggttgcgtattgtttgatcaagagctccaagtcgctaaagaagaaagggaaacacctactactgctagtatgccgccattattgcgacaagcttgggaattaaaggatcaccaaggtgcagagccagccttcttattcggccttgaattgatcatatgcggattagaaaaacaacttaaatgcgaaagtgggtcttaa

SEQ ID NO: 454 - DNA, 627 bp, Artificial Sequence
  Sulfonylurea responsive repressor
  misc_feature 204, 337: n = A,T,C or G
atgggatctagattagataaaagtaaagtgattaacagcgcattagagctgcttaatgaggtcggaatcgaaggtttaacaacccgtaaactcgcccagaagctaggtgtagagcagcctacattgtattggcatgtaaaaaataagcgagctctgctcgacgccttagccattgagatgatggataggcaccaaactcactantgccctttagaaggggaaagctggcaagattttttacgtaatactgctaaaagtatgagatgtgctttactaagccatcgcgatggagcaaaagtatgtttaggtacacgctggacagaacaacaatatgaanctgctgaaaatctgttagcctttttatgccaacaaggtttttcactagagaatgcattatatgcaatgagtgctgtgagggtgtttactttaggttgcgtattgtttgatcaagagatccaagtcgctaaagaagaaagggaaacacctactactgctagtatgccgccattattgcgacaagttttggaattaaaggatcaccaaggtgcagagccagccttcttattcggccttgaattgatcatatgcggattagaaaaacaacttaaatgcgaaagtgggtcttaa

SEQ ID NO: 455 - DNA, 627 bp, Artificial Sequence
  Sulfonylurea responsive repressor
atgggatctagattagataaaagtaaagtgattaacagcgcattagagctgcttaatgaggtcggaatcgaaggtttaacaacccgtaaactcgcccagaagctaggtgtagagcagcctacattgtattggcatgtaaaaaataagcgagctctgctcgacgccttagccattgagatgatggataggcaccaaactcactattgccctttagaaggggaaagctggcaagattttttacgtaatactgctaaaagtatgagatgtgctttactaagccatcgcgatggagcaaaagtatgtttaggtacacgctggacagaaaaacattatgaaactgctgaaaatatgttagcctttttatgccaacaaggtttttcactagagaatgcattatatgcagtgagtgctgtgagggtgtttactttaggttgcgtattgtttgatcaagagagccaagtcgctaaagaagaaagggaaacacctactactgctagtatgccgccattattgcgacaagtttgggaattaaaggatcaccaaggtgcagagccagccttcttattcggccttgaattgatcatatgcggattagaaaaacaacttaaatgcgaaagtgggtcttaa

SEQ ID NO: 456 - DNA, 627 bp, Artificial Sequence
  Sulfonylurea responsive repressor
atgggatctagattagataaaagtaaagtgattaacagcgcattagagctgcttaatgaggtcggaatcgaaggtttaacaacccgtaaactcgcccagaagctaggtgtagagcagcctacattgtattggcatgtaaaaaataagcgagctctgctcgacgccttagccattgagatgatggataggcaccaaactcacgtttgccctttagaaggggaaagctggcaagattttttacgtaataatgctaaaagtatgagatgtgctttactaagccatcgcgatggagcaaaagtatgtttaggtacacgctggacagaacaattgtatgaaactgctgaaaatatgttagcctttttatgccaacaaggtttttcactagagaatgcattatatgcaatgagtgctgtgagggtgtttactttaggttgcgtattgtttgatcaagagagccaagtcgctaaagaagaaagggaaacacctactactgctagtatgccgccattagtgcgacaaggttgggaattaaaggatcaccaaggtgcagagccagccttcttattcggccttgaattgatcatatgcggattagaaaaacaacttaaatgcgaaagtgggtcttaa

SEQ ID NO: 457 - DNA, 627 bp, Artificial Sequence
  Sulfonylurea responsive repressor
  misc_feature 328: n = A,T,C or G
atgggatctagattagataaaagtaaagtgattaacagcgcattagagctgcttaatgaggtcggaatcgaaggtttaacaacccgtaaactcgcccagaagctaggtgtagagcagcctacattgtattggcatgtaaaaaataagcgagctctgctcgacgccttagccattgagatgatggataggcacgcaactcacttgtgccctttagaaggggaaagctggcaagattttttacgtaataatgctaaaagtatgagatgtgctttactaagccatcgcgatggagcaaaagtatgtttaggtacacgctggacagaaaaantgtatgaaagtgctgaaaatcaattagcctttttatgccaacaaggtttttcactagagaatgcattatatgcaatgagtgctgtgagggtgtttactttaggttgcgtattgtttgatcaagagctccaagtcgctaaagaagaaagggaaacacctactactgctagtatgccgccattattgcgacaagcttgggaattaaaggatcaccaaggtgcagagccagccttcttattcggccttgaattgatcatatgcggattagaaaaacaacttaaatgcgaaagtgggtcttaa

SEQ ID NO: 458 - DNA, 627 bp, Artificial Sequence
  Sulfonylurea responsive repressor
atgggatctagattagataaaagtaaagtgattaacagcgcattagagctgcttaatgaggtcggaatcgaaggtttaacaacccgtaaactcgcccagaagctaggtgtagagcagcctacattgtattggcatgtaaaaaataagcgagctctgctcgacgccttagccattgagatgatggataggcaccaaactcactattgccctttagaaggggaaagctggcaagattttttacgtaatactgctaaaagtatgagatgtgctttactaagccatcgcgatggagcaaaagtatgtttaggtacacgctggacagaacaacaatatgaaactgctgaaaatatgttagcctttttatgccaacaaggtttttcactagagaatgcattatatgcagtgagtgctgtgaggaactttactttaggttgcgtattgtttgatcaagagagccaagtcgctaaagaagaaagggaaacacctactactgctagtatgccgccattagtgcgacaagcttgggaattaaaggatcaccaaggtgcagagccagccttcttattcggccttgaattgatcatatgcggattagaaaaacaacttaaatgcgaaagtgggtcttaa

SEQ ID NO: 459 - DNA, 627 bp, Artificial Sequence
  Sulfonylurea responsive repressor
atgggatctagattagataaaagtaaagtgattaacagcgcattagagctgcttaatgaggtcggaatcgaaggtttaacaacccgtaaactcgcccagaagctaggtgtagagcagcctacattgtattggcatgtaaaaaataagcgagctctgctcgacgccttagccattgagatgatggataggcaccaaactcacttttgccctttagaaggggaaagctggcaagattttttacgtaataatgctaaaagtatgagatgtgctttactaagccatcgcgatggagcaaaagtatggttaggtacacgctggacagaacaaatgtatgaaactgctgaaaatatgttagcctttttatgccaacaaggtttttcactagagaatgcattatatgcagtgagtgctgtgaggaactttactttaggttgcgtattgtttgatcaagagagccaagtcgctaaagaagaaagggaaacacctactactgctagtatgccgccattattgcgacaaggttgggaattaaaggatcaccaaggtgcagagccagccttcttattcggccttgaattgatcatatgcggattagaaaaacaacttaaatgcgaaagtgggtcttaa

SEQ ID NO: 460 - DNA, 627 bp, Artificial Sequence
  Sulfonylurea responsive repressor
atgggatctagattagataaaagtaaagtgattaacagcgcattagagctgcttaatgaggtcggaatcgaaggtttaacaacccgtaaactcgcccagaagctaggtgtagagcagcctacattgtattggcatgtaaaaaataagcgagctctgctcgacgccttagccattgagatgatggataggcaccaaactcacttttgccctttagaaggggaaagctggcaagattttttacgtaatactgctaaaagtatgagatgtgctttactaagccatcgcgatggagcaaaagtatgtttaggtacacgctggacagaacaacaatatgaaactgctgaaaatatgttagcctttttatgccaacaaggtttttcactagagaatgcattatatgcaatgagtgctgtgagggtgtttactttaggttgcgtattgtttgatcaagagagccaagtcgctaaagaagaaagggaaacacctactactgctagtatgccgccattagtgcgacaagcttgggaattaaaggatcaccaaggtgcagagccagccttcttattcggccttgaattgatcatatgcggattagaaaaacaacttaaatgcgaaagtgggtcttaa

SEQ ID NO: 461 - DNA, 627 bp, Artificial Sequence
  Sulfonylurea responsive repressor
atgggatctagattagataaaagtaaagtgattaacagcgcattagagctgcttaatgaggtcggaatcgaaggtttaacaacccgtaaactcgcccagaagctaggtgtagagcagcctacattgtattggcatgtaaaaaataagcgagctctgctcgacgccttagccattgagatgatggataggcaccaaactcactattgccctttagaaggggaaagctggcaagattttttacgtaatactgctaaaagtatgagatgtgctttactaagccatcgcgatggagcaaaagtatgtttaggtacacgctggacagaacaacaatatgaaagtgctgaaaatcaattagcctttttatgccaacaaggtttttcactagagaatgcattatatgcagtgagtgctgtgagggtgtttactttaggttgcgtattgtttgatcaagagagccaagtcgctaaagaagaaagggaaacacctactactgctagtatgccgccattattgcgacaagcttgggaattaaaggatcaccaaggtgcagagccagccttcttattcggccttgaattgatcatatgcggattagaaaaacaacttaaatgcgaaagtgggtcttaa

SEQ ID NO: 462 - DNA, 627 bp, Artificial Sequence
  Sulfonylurea responsive repressor
atgggatctagattagataaaagtaaagtgattaacagcgcattagagctgcttaatgaggtcggaatcgaaggtttaacaacccgtaaactcgcccagaagctaggtgtagagcagcctacattgtattggcatgtaaaaaataagcgagctctgctcgacgccttagccattgagatgatggataggcaccaaactcacatgtgccctttagaaggggaaagctggcaagattttttacgtaataatgctaaaagtatgagatgtgctttactaagccatcgcgatggagcaaaagtatgtttaggtacacgctggacagaaaaaatgtatgaagctgctgaaaatatgttagcctttttatgccaacaaggtttttcactagagaatgcattatatgcagtgagtgctgtgagggtgtttactttaggttgcgtattgtttgatcaagagctccaagtcgctaaagaagaaagggaaacacctactactgctagtatgccgccattattgcgacaagcttgggaattaaaggatcaccaaggtgcagagccagccttcttattcggccttgaattgatcatatgcggattagaaaaacaacttaaatgcgaaagtgggtcttaa

SEQ ID NO: 463 - DNA, 627 bp, Artificial Sequence
  Sulfonylurea responsive repressor
atgggatctagattagataaaagtaaagtgattaacagcgcattagagctgcttaatgaggtcggaatcgaaggtttaacaacccgtaaactcgcccagaagctaggtgtagagcagcctacattgtattggcatgtaaaaaataagcgagctctgctcgacgccttagccattgagatgatggataggcacgcaactcactattgccctttagaaggggaaagctggcaagattttatacgtaatactgctaaaagtatgagatgtgctttactaagccatcgcgatggagcaaaagtatgtttaggtacacgctggacagaaaaacattatgaaactgctgaaaatatgttagcctttttatgccaacaaggtttttcactagagaatgcattatatgcagtgagtgctgtggggaactttactttaggttgcgtattgtttgatcaagagagccaagtcgctaaagaagaaagggaaacacctactactgctagtatgccgccattattgcgacaagtttgggaattaaaggatcaccaaggtgcagagccagccttcttattcggccttgaattgatcatatgcggattagaaaaacaacttaaatgcgaaagtgggtcttaa

SEQ ID NO: 464 - DNA, 627 bp, Artificial Sequence
  Sulfonylurea responsive repressor
atgggatctagattagataaaagtaaagtgattaacagcgcattagagctgcttaatgaggtcggaatcgaaggtttaacaacccgtaaactcgcccagaagctaggtgtagagcagcctacattgtattggcatgtaaaaaataagcgagctctgctcgacgccttagccattgagatgatggataggcacgcaactcacttgtgccctttagaaggggaaagctggcaagattttttacgtaatactgctaaaagtatgagatgtgctttactaagccatcgcgatggagcaaaagtatgtttaggtacacgctggacagaaaaacaatatgaaagtgctgaaaatcaattagcctttttatgccaacaaggtttttcactagagaatgcattatatgcaatgagtgctgtgagggtgtttactttaggttgcgtattgtttgatcaagagagccaagtcgctaaagaagaaagggaaacacctactactgctagtatgccgccattattgcgacaagtttgggaattaaaggatcaccaaggtgcagagccagccttcttattcggccttgaattgatcatatgcggattagaaaaacaacttaaatgcgaaagtgggtcttaa

SEQ ID NO: 465 - DNA, 627 bp, Artificial Sequence
  Sulfonylurea responsive repressor
atgggatctagattagataaaagtaaagtgattaacagcgcattagagctgcttaatgaggtcggaatcgaaggtttaacaacccgtaaactcgcccagaagctaggtgtagagcagcctacattgtattggcatgtaaaaaataagcgagctctgctcgacgccttagccattgagatgatggataggcaccaaactcactattgccctttagaaggggaaagctggcaagattttttacgtaataatgctaaaagtatgagatgtgctttactaagccatcgcgatggagcaaaagtatgtttaggtacacgctggacagaacaaatgtatgaaagtgctgaaaatatgttagcctttttatgccaacaaggtttttcactagagaatgcattatatgcagtgagtgctgtgagggtgtttactttaggttgcgtattgtttgatcaagagagccaagtcgctaaagaagaaagggaaacacctactactgctagtatgccgccattattgcgacaaggttgggaattaaaggatcaccaaggtgcagagccagccttcttattcggccttgaattgatcatatgcggattagaaaaacaacttaaatgcgaaagtgggtcttaa

SEQ ID NO: 466 - DNA, 627 bp, Artificial Sequence
  Sulfonylurea responsive repressor
atgggatctagattagataaaagtaaagtgattaacagcgcattagagctgcttaatgaggtcggaatcgaaggtttaacaacccgtaaactcgcccagaagctaggtgtagagcagcctacattgtattggcatgtaaaaaataagcgagctctgctcgacgccttagccattgagatgatggataggcaccaaactcacttttgccctttagaaggggaaagctggcaagattttttacgtaataatgctaaaagtatgagatgtgctttactaagccatcgcgatggagcaaaagtatgtttaggtacacgctggacagaacaaatgtatgaaggtgctgaaaatatgttagcctttttatgccaacaaggtttttcactagagaatgcattatatgcaatgagtgctgtgagggtgtttactttaggttgcgtattgtttgatcaagagagccaagtcgctaaagaagaaagggaaacacctactactgctagtatgccgccattattgcgacaaggttgggaattaaaggatcaccaaggtgcagagccagccttcttattcggccttgaattgatcatatgcggattagaaaaacaacttaaatgcgaaagtgggtcttaa

SEQ ID NO: 467 - DNA, 627 bp, Artificial Sequence
  Sulfonylurea responsive repressor
atgggatctagattagataaaagtaaagtgattaacagcgcattagagctgcttaatgaggtcggaatcgaaggtttaacaacccgtaaactcgcccagaagctaggtgtagagcagcctacattgtattggcatgtaaaaaataagcgagctctgctcgacgccttagccattgagatgatggataggcaccaaactcactattgccctttagaaggggaaagctggcaagattttttacgtaataatgctaaaagtatgagatgtgctttactaagccatcgcgatggagcaaaagtatgtttaggtacacgctggacagaacaacattatgaagctgctgaaaatatgttagcctttttatgccaacaaggtttttcactagagaatgcattatatgcaatgagtgctgtgagggtgtttactttaggttgcgtattgtttgatcaagagagccaagtcgctaaagaagaaagggaaacacctactactgctagtatgccgccattagtgcgacaagcttgggaattaaaggatcaccaaggtgcagagccagccttcttattcggccttgaattgatcatatgcggattagaaaaacaacttaaatgcgaaagtgggtcttaa

SEQ ID NO: 468 - DNA, 627 bp, Artificial Sequence
  Sulfonylurea responsive repressor
atgggatctagattagataaaagtaaagtgattaacagcgcattagagctgcttaatgaggtcggaatcgaaggtttaacaacccgtaaactcgcccagaagctaggtgtagagcagcctacattgtattggcatgtaaaaaataagcgagctctgctcgacgccttagccattgagatgatggataggcacgcaactcactattgccctttagaaggggaaagctggcaagattttttacgtaataatgctaaaagtatgagatgtgctttactaagccatcgcgatggagcaaaagtatgtttaggtacacgctggacagaacaattgtatgaaactgctgaaaatcaattagcctttttatgccaacaaggtttttcactagagaatgcattatatgcaatgagtgctgtgaggaactttactttaggttgcgtattgtttgatcaagagagccaagtcgctaaagaagaaagggaaacacctactactgctagtatgccgccattagtgcgacaagcttgggaattaaaggatcaccaaggtgcagagccagccttcttattcggccttgaattgatcatatgcggattagaaaaacaacttaaatgcgaaagtgggtcttaa

SEQ ID NO: 469 - DNA, 627 bp, Artificial Sequence
  Sulfonylurea responsive repressor
atgggatctagattagataaaagtaaagtgattaacagcgcattagagctgcttaatgaggtcggaatcgaaggtttaacaacccgtaaactcgcccagaagctaggtgtagagcagcctacattgtattggcatgtaaaaaataagcgagctctgctcgacgccttagccattgagatgatggataggcacgcaactcacatgtgccctttagaaggggaaagctggcaagattttttacgtaatactgctaaaagtatgagatgtgctttactaagccatcgcgatggagcaaaagtatgtttaggtacacgctggacagaaaaacaatatgaaactgctgaaaatatgttagcctttttatgccaacaaggtttttcactagagaatgcattatatgcagtgagtgctgtgagggtgtttactttaggttgcgtattgtttgatcaagagagccaagtcgctaaagaagaaagggaaacacctactactgctagtatgccgccattattgcgacaagtttgggaattaaaggatcaccaaggtgcagagccagccttcttattcggccttgaattgatcatatgcggattagaaaaacaacttaaatgcgaaagtgggtcttaa

SEQ ID NO: 470 - DNA, 627 bp, Artificial Sequence
  Sulfonylurea responsive repressor
atgggatctagattagataaaagtaaagtgattaacagcgcattagagctgcttaatgaggtcggaatcgaaggtttaacaacccgtaaactcgcccagaagctaggtgtagagcagcctacattgtattggcatgtaaaaaataagcgagctctgctcgacgccttagccattgagatgatggataggcacgcaactcactattgccctttagaaggggaaagctggcaagattttttacgtaatactgctaaaagtatgagatgtgctttactaagccatcgcgatggagcaaaagtatgtttaggtacacgctggacagaaaaattgtatgaaactgctgaaaatatgttagcctttttatgccaacaaggtttttcactagagaatgcattatatgcagtgagtgctgtgagggtgtttactttaggttgcgtattgtttgatcaagagctccaagtcgctaaagaagaaagggaaacacctactactgctagtatgccgccattagtgcgacaagcttgggaattaaaggatcaccaaggtgcagagccagccttcttattcggccttgaattgatcatatgcggattagaaaaacaacttaaatgcgaaagtgggtcttaa

SEQ ID NO: 471 - DNA, 627 bp, Artificial Sequence
  Sulfonylurea responsive repressor
atgggatctagattagataaaagtaaagtgattaacagcgcattagagctgcttaatgaggtcggaatcgaaggtttaacaacccgtaaactcgcccagaagctaggtgtagagcagcctacattgtattggcatgtaaaaaataagcgagctctgctcgacgccttagccattgagatgatggataggcacgcaactcacttttgccctttagaaggggaaagctggcaagattttttacgtaatactgctaaaagtatgagatgtgctttactaagccatcgcgatggagcaaaagtatgtttaggtacacgctggacagaacaattgtatgaaactgctgaaaatatgttagcctttttatgccaacaaggtttttcactagagaatgcattatatgcaatgagtgctgtgagggtgtttactttaggttgcgtattgtttgatcaagagagccaagtcgctaaagaagaaagggaaacacctactactgctagtatgccgccattagtgcgacaaggttgggaattaaaggatcaccaaggtgcagagccagccttcttattcggccttgaattgatcatatgcggattagaaaaacaacttaaatgcgaaagtgggtcttaa

SEQ ID NO: 472 - DNA, 627 bp, Artificial Sequence
  Sulfonylurea responsive repressor
atgggatctagattagataaaagtaaagtgattaacagcgcattagagctgcttaatgaggtcggaatcgaaggtttaacaacccgtaaactcgcccagaagctaggtgtagagcagcctacattgtattggcatgtaaaaaataagcgagctctgctcgacgccttagccattgagatgatggataggcaccaaactcacttgtgccctttagaaggggaaagctggcaagattttttacgtaataatgctaaaagtatgagatgtgctttactcagccatcgcgatggagcaaaagtatgtttaggtacacgctggacagaaaaacattatgaagctgctgaaaatcaattagcctttttatgccaacaaggtttttcactagagaatgcattatatgcaatgagtgctgtgagggtgtttactttaggttgcgtattgtttgatcaagagagccaagtcgctaaagaagaaagggaaacacctactactgctagtatgccgccattattgcgacaaggttgggaattaaaggatcaccaaggtgcagagccagccttcttattcggccttgaattgatcatatgcggattagaaaaacaacttaaatgcgaaagtgggtcttaa

SEQ ID NO: 473 - DNA, 627 bp, Artificial Sequence
  Sulfonylurea responsive repressor
  misc_feature 193, 328: n = A,T,C or G
atgggatctagattagataaaagtaaagtgattaacagcgcattagagctgcttaatgaggtcggaatcgaaggtttaacaacccgtaaactcgcccagaagctaggtgtagagcagcctacattgtattggcatgtaaaaaataagcgagctctgctcgacgccttagccattgagatgatggataggcacncaactcactattgccctttagaaggggaaagctggcaagattttttacgtaataatgctaaaagtatgagatgtgctttactaagccatcgcgatggagcaaaagtatggttaggtacacgctggacagaacaantgtatgaaactgctgaaaatcaattagcctttttatgccaacaaggtttttcactagagaatgcattatatgcagtgagtgctgtgagggtgtttactttaggttgcgtattgtttgatcaagagctccaagtcgctaaagaagaaagggaaacacctactactgctagtatgccgccattattgcgacaaggtttggaattaaaggatcaccaaggtgcagagccagccttcttattcggccttgaattgatcatatgcggattagaaaaacaacttaaatgcgaaagtgggtcttaa

SEQ ID NO: 474 - DNA, 627 bp, Artificial Sequence
  Sulfonylurea responsive repressor
atgggatctagattagataaaagtaaagtgattaacagcgcattagagctgcttaatgaggtcggaatcgaaggtttaacaacccgtaaactcgcccagaagctaggtgtagagcagcctacattgtattggcatgtaaaaaataagcgagctctgctcgacgccttagccattgagatgatggataggcacgcaactcactattgccctttagaaggggaaagctggcaagattttttacgtaatactgctaaaagtatgagatgtgctttactaagccatcgcgatggagcaaaagtatgtttaggtacacgctggacagaacaacaatatgaaagtgctgaaaatatgttagcctttttatgccaacaaggtttttcactagagaatgcattatatgcaatgagtgctgtgagggtgtttactttaggttgcgtattgtttgatcaagagctccaagtcgctaaagaagaaagggaaacacctactactgctagtatgccgccattagtgcgacaaggttgggaattaaaggatcaccaaggtgcagagccagccttcttattcggccttgaattgatcatatgcggattagaaaaacaacttaaatgcgaaagtgggtcttaa

SEQ ID NO: 475 - DNA, 627 bp, Artificial Sequence
  Sulfonylurea responsive repressor
atgggatctagattagataaaagtaaagtgattaacagcgcattagagctgcttaatgaggtcggaatcgaaggtttaacaacccgtaaactcgcccagaagctaggtgtagagcagcctacattgtattggcatgtaaaaaataagcgagctctgctcgacgccttagccattgagatgatggataggcacgcaactcactattgccctttagaaggggaaagctggcaagattttttacgtaatactgctaaaagtatgagatgtgctttactaagccatcgcgatggagcaaaagtatgtttaggtacacgctggacagaacaacaatatgaaactgctgaaaatatgttagcctttttatgccaacaaggtttttcactagagaatgcattatatgcagtgagtgctgtgagggtgtttactttaggttgcgtattgtttgatcaagagctccaagtcgctaaagaagaaagggaaacacctactactgctagtatgccgccattagtgcgacaagcttgggaattaaaggatcaccaaggtgcagagccagccttcttattcggccttgaattgatcatatgcggattagaaaaacaacttaaatgcgaaagtgggtcttaa

SEQ ID NO: 476 - DNA, 627 bp, Artificial Sequence
  Sulfonylurea responsive repressor
  misc_feature 204, 303, 420: n = A,T,C or G
atgggatctagattagataaaagtaaagtgattaacagcgcattagagctgcttaatgaggtcggaatcgaaggtttaacaacccgtaaactcgcccagaagctaggtgtagagcagcctacattgtattggcatgtaaaaaataagcgagctctgctcgacgccttagccattgagatgatggataggcacccaactcactantgccctttagaaggggaaagctggcaagattttttacgtaatamtgctaaaagtatgagatgtgctttactaagccatcgcgatggagcaaaagtatgnttaggtacacgctggacagaacaactgtatgaaactgctgaaaatatgttagcctttttatgccaacaaggtttttcactagagaatgcattatatgcaatgagtgctgtgagggtntttactttaggttgcgtattgtttgatcaagagagccaagtcgctaaagaagaaagggaaacacctactactgctagtatgccgccattaktgcgacaagtttgggaattaaaggatcaccaaggtgcagagccagccttcttattcggccttgaattgatcatatgcggattagaaaaacaacttaaatgcgaaagtgggtcttaa

SEQ ID NO: 477 - DNA, 627 bp, Artificial Sequence
  Sulfonylurea responsive repressor
  misc_feature 513: n = A,T,C or G
atgggatctagattagataaaagtaaagtgattaacagcgcattagagctgcttaatgaggtcggaatcgaaggtttaacaacccgtaaactcgcccagaagctaggtgtagagcagcctacattgtattggcatgtaaaaaataagcgagctctgctcgacgccttagccattgagatgatggataggcacgcaactcactattgccctttagaaggggaaagctggcaagattttttacgtaataatgctaaaagtatgagatgtgctttactaagccatcgcgatggagcaaaagtatgtttaggtacacgctggacagaacaattgtatgaaactgctgaaaatcaattagcctttttatgccaacaaggtttttcactagagaatgcattatatgcagtgagtgctgtgagggtgtttactttaggttgcgtattgtttgatcaagagagccaagtcgctaaagaagaaagggaaacacctactactgctagtatgccgccattattncgacaaggttgggaattaaaggatcaccaaggtgcagagccagccttcttattcggccttgaattgatcatatgcggattagaaaaacaacttaaatgcgaaagtgggtcttaa

SEQ ID NO: 478 - DNA, 627 bp, Artificial Sequence
  Sulfonylurea responsive repressor
atgggatctagattagataaaagtaaagtgattaacagcgcattagagctgcttaatgaggtcggaatcgaaggtttaacaacccgtaaactcgcccagaagctaggtgtagagcagcctacattgtattggcatgtaaaaaataagcgagctctgctcgacgccttagccattgagatgatggataggcaccaaactcactattgccctttagaaggggaaagctggcaagattttttacgtaataatgctaaaagtatgagatgtgctttactaagccatcgcgatggagcaaaagtatgtttaggtacacgctggacagaacaacaatatgaagctgctgaaaatcaattagcctttttatgccaacaaggtttttcactagagaatgcattatatgcaatgagtgctgtgagggtgtttactttaggttgcgtattgtttgatcaagagctccaagtcgctaaagaagaaagggaaacacctactactgctagtatgccgccattagtgcgacaagcttgggaattaaaggatcaccaaggtgcagagccagccttcttattcggccttgaattgatcatatgcggattagaaaaacaacttaaatgcgaaagtgggtcttaa

SEQ ID NO: 479 - DNA, 627 bp, Artificial Sequence
  Sulfonylurea responsive repressor
atgggatctagattagataaaagtaaagtgattaacagcgcattagagctgcttaatgaggtcggaatcgaaggtttaacaacccgtaaactcgcccagaagctaggtgtagagcagcctacattgtattggcatgtaaaaaataagcgagctctgctcgacgccttagccattgagatgatggataggcaccaaactcactattgccctttagaaggggaaagctggcaagattttttacgtaatactgctaaaagtatgagatgtgctttactaagccatcgcgatggagcaaaagtatgtttaggtacacgctggacagaacaaatgtatgaaagtgctgaaaatatgttagcctttttatgccaacaaggtttttcactagagaatgcattatatgcagtgagtgctgtgagggtgtttactttaggttgcgtattgtttgatcaagagagccaagtcgctaaagaagaaagggaaacacctactactgctagtatgccgccattattgcgacaaggttgggaattaaaggatcaccaaggtgcagagccagccttcttattcggccttgaattgatcatatgcggattagaaaaacaacttaaatgcgaaagtgggtcttaa

SEQ ID NO: 480 - DNA, 627 bp, Artificial Sequence
  Sulfonylurea responsive repressor
atgggatctagattagataaaagtaaagtgattaacagcgcattagagctgcttaatgaggtcggaatcgaaggtttaacaacccgtaaactcgcccagaagctaggtgtagagcagcctacattgtattggcatgtaaaaaataagcgagctctgctcgacgccttagccattgagatgatggataggcaccaaactcactattgccctttagaaggggaaagctggcaagattttttacgtaataatgctaaaagtatgagatgtgctttactaagccatcgcgatggagcaaaagtatgtttaggtacacgctggacagaacaacaatatgaaagtgctgaaaatcaattagcctttttatgccaacaaggtttttcactagagaatgcattatatgcagtgagtgctgtgagggtgtttactttaggttgcgtattgtttgatcaagagagccaagtcgctaaagaagaaagggaaacacctactactgctagtatgccgccattagtgcgacaagcttgggaattaaaggatcaccaaggtgcagagccagccttcttattcggccttgaattgatcatatgcggattagaaaaacaacttaaatgcgaaagtgggtcttaa

SEQ ID NO: 481 - DNA, 627 bp, Artificial Sequence
  Sulfonylurea responsive repressor
atgggatctagattagataaaagtaaagtgattaacagcgcattagagctgcttaatgaggtcggaatcgaaggtttaacaacccgtaaactcgcccagaagctaggtgtagagcagcctacattgtattggcatgtaaaaaataagcgagctctgctcgacgccttagccattgagatgatggataggcaccaaactcactattgccctttagaaggggaaagctggcaagattttttacgtaataatgctaaaagtatgagatgtgctttactaagccatcgcgatggagcaaaagtatgtttaggtacacgctggacagaaaaattgtatgaaactgctgaaaatatgttagcctttttatgccaacaaggtttttcactagagaatgcattatatgcagtgagtgctgtgagggtgtttactttaggttgcgtattgtttgatcaagagagccaagtcgctaaagaagaaagggaaacacctactactgctagtatgccgccattattgcgacaagtttgggaattaaaggatcaccaaggtgcagagccagccttcttattcggccttgaattgatcatatgcggattagaaaaacaacttaaatgcgaaagtgggtcttaa

SEQ ID NO: 482 - DNA, 627 bp, Artificial Sequence
  Sulfonylurea responsive repressor
atgggatctagattagataaaagtaaagtgattaacagcgcattagagctgcttaatgaggtcggaatcgaaggtttaacaacccgtaaactcgcccagaagctaggtgtagagcagcctacattgtattggcatgtaaaaaataagcgagctctgctcgacgccttagccattgagatgatggataggcacgcaactcactattgccctttagaaggggaaagctggcaagattttttacgtaatactgctaaaagtatgagatgtgctttactaagccatcgcgatggagcaaaagtatgtttaggtacacgctggacagaacaaatgtatgaaactgctgaaaatatgttagcctttttatgccaacaaggtttttcactagagaatgcattatatgcaatgagtgctgtgagggtgtttactttaggttgcgtattgtttgatcaagagctccaagtcgctaaagaagaaagggaaacacctactactgctagtatgccgccattagtgcgacaaggttgggaattaaaggatcaccaaggtgcagagccagccttcttattcggccttgaattgatcatatgcggattagaaaaacaacttaaatgcgaaagtgggtcttaa

SEQ ID NO: 483 - DNA, 627 bp, Artificial Sequence
  Sulfonylurea responsive repressor
atgggatctagattagataaaagtaaagtgattaacagcgcattagagctgcttaatgaggtcggaatcgaaggtttaacaacccgtaaactcgcccagaagctaggtgtagagcagcctacattgtattggcatgtaaaaaataagcgagctctgctcgacgccttagccattgagatgatggataggcaccaaactcactattgccctttagaaggggaaagctggcaagattttttacgtaataatgctaaaagtatgagatgtgctttactaagccatcgcgatggagcaaaagtatgtttaggtacacgctggacagaacaaatgtatgaaactgctgaaaatcaattagcctttttatgccaacaaggtttttcactagagaatgcattatatgcaatgagtgctgtgagggtgtttactttaggttgcgtattgtttgatcaagagctccaagtcgctaaagaagaaagggaaacacctactactgctagtatgccgccattattgcgacaaggttgggaattaaaggatcaccaaggtgcagagccagccttcttattcggacttgaattgatcatatgcggattagaaaaacaacttaaatgcgaaagtgggtcttaa

SEQ ID NO: 484 - DNA, 627 bp, Artificial Sequence
  Sulfonylurea responsive repressor
atgggatctagattagataaaagtaaagtgattaacagcgcattagagctgcttaatgaggtcggaatcgaaggtttaacaacccgtaaactcgcccagaagctaggtgtagagcagcctacattgtattggcatgtaaaaaataagcgagctctgctcgacgccttagccattgagatgatggataggcacgcaactcactattgccctttagaaggggaaagctggcaagattttttacgtaatactgctaaaagtatgagatgtgctttactaagccatcgcgatggagcaaaagtatgtttaggtacacgctggacagaacaacaatatgaagctgctgaaaatcaattagcctttttatgccaacaaggtttttcactagagaatgcattatatgcagtgagtgctgtgagggtgtttactttaggttgcgtattgtttgatcaagagagccaagtcgctaaagaagaaagggaaacacctactactgctagtatgccgccattattgcgacaaggttgggaattaaaggatcaccaaggtgcagagccagccttcttattcggccttgaattgatcatatgcggattagaaaaacaacttaaatgcgaaagtgggtcttaa

SEQ ID NO: 485 - DNA, 627 bp, Artificial Sequence
  Sulfonylurea responsive repressor
atgggatctagattagataaaagtaaagtgattaacagcgcattagagctgcttaatgaggtcggaatcgaaggtttaacaacccgtaaactcgcccagaagctaggtgtagagcagcctacattgtattggcatgtaaaaaataagcgagctctgctcgacgccttagccattgagatgatggataggcaccaaactcactattgccctttagaaggggaaagctggcaagattttttacgtaatactgctaaaagtatgagatgtgctttactaagccatcgcgatggagcaaaagtatggttaggtacacgctggacagaacaacaatatgaaagtgctgaaaatatgttagcctttttatgccaacaaggtttttcactagagaatgcattatatgcagtgagtgctgtgagggtgtttactttaggttgcgtattgtttgatcaagagctccaagtcgctaaagaagaaagggaaacacctactactgctagtatgccgccattagtgcgacaagcttgggaattaaaggatcaccaaggtgcagagccagccttcttattcggccttgaattgatcatatgcggattagaaaaacaacttaaatgcgaaagtgggtcttaa

SEQ ID NO: 486 - DNA, 627 bp, Artificial Sequence
  Sulfonylurea responsive repressor
atgggatctagattagataaaagtaaagtgattaacagcgcattagagctgcttaatgaggtcggaatcgaaggtttaacaacccgtaaactcgcccagaagctaggtgtagagcagcctacattgtattggcatgtaaaaaataagcgagctctgctcgacgccttagccattgagatgatggataggcaccaaactcacatgtgccctttagaaggggaaagctggcaagattttttacgtaataatgctaaaagtatgagatgtgctttactaagccatcgcgatggagcaaaagtatgtttaggtacacgctggacagaaaaattgtatgaaactgctgaaaatcaattagcctttttatgccaacaaggtttttcactagagaatgcattatatgcagtgagtgctgtgagggtgtttactttaggttgcgtattgtttgatcaagagagccaagtcgctaaagaagaaagggaaacacctactactgctagtatgccgccattagtgcgacaagcttgggaattaaaggatcaccaaggtgcagagccagccttcttattcggccttgaattgatcatatgcggattagaaaaacaacttaaatgcgaaagtgggtcttaa

SEQ ID NO: 487 - DNA, 627 bp, Artificial Sequence
  Sulfonylurea responsive repressor
atgggatctagattagataaaagtaaagtgattaacagcgcattagagctgcttaatgaggtcggaatcgaaggtttaacaacccgtaaactcgcccagaagctaggtgtagagcagcctacattgtattggcatgtaaaaaataagcgagctctgctcgacgccttagccattgagatgatggataggcaccaaactcactattgccctttagaaggggaaagctggcaagattttttacgtaatactgctaaaagtatgagatgtgctttactaagccatcgcgatggagcaaaagtatgtttaggtacacgctggacagaaaaacaatatgaaactgctgaaaatatgttagcctttttatgccaacaaggtttttcactagagaatgcattatatgcaatgagtgctgtgagggtgtttactttaggttgcgtattgtttgatcaagagagccaagtcgctaaagaagaaagggaaacacctactactgctagtatgccgccattagtgcgacaagtttgggaattaaaggatcaccaaggtgcagagccagccttcttattcggccttgaattgatcatatgcggattagaaaaacaacttaaatgcgaaagtgggtcttaa

SEQ ID NO: 488 - DNA, 627 bp, Artificial Sequence
  Sulfonylurea responsive repressor
atgggatctagattagataaaagtaaagtgattaacagcgcattagagctgcttaatgaggtcggaatcgaaggtttaacaacccgtaaactcgcccagaagctaggtgtagagcagcctacattgtattggcatgtaaaaaataagcgagctctgctcgacgccttagccattgagatgatggataggcaccaaactcacttttgccctttagaaggggaaagctggcaagattttttacgtaataatgctaaaagtatgagatgtgctttactaagccatcgcgatggagcaaaagtatgtttaggtacacgctggacagaacaacaatatgaaagtgctgaaaatcaattagcctttttatgccaacaaggtttttcactagagaatgcattatatgcagtgagtgctgtgagggtgtttactttaggttgcgtattgtttgatcaagagctccaagtcgctaaagaagaaagggaaacacctactactgctagtatgccgccattattgcgacaagctttggaattaaaggatcaccaaggtgcagagccagccttcttattcggccttgaattgatcatatgcggattagaaaaacaacttaaatgcgaaagtgggtcttaa

SEQ ID NO: 489 - DNA, 627 bp, Artificial Sequence
  Sulfonylurea responsive repressor
atgggatctagattagataaaagtaaagtgattaacagcgcattagagctgcttaatgaggtcggaatcgaaggtttaacaacccgtaaactcgcccagaagctaggtgtagagcagcctacattgtattggcatgtaaaaaataagcgagctctgctcgacgccttagccattgagatgatggataggcacgcaactcactattgccctttagaaggggaaagctggcaagattttttacgtaataatgctaaaagtatgagatgtgctttactaagccatcgcgatggagcaaaagtatgtttaggtacacgctggacagaaaaacaatatgaaagtgctgaaaatatgttagcctttttatgccaacaaggtttttcactagagaatgcattatatgcagtgagtgctgtgaggaactttactttaggttgcgtattgtttgatcaagagagccaagtcgctaaagaagaaagggaaacacctactactgctagtatgccgccattattgcgacaaggttgggaattaaaggatcaccaaggtgcagagccagccttcttattcggccttgaattgatcatatgcggattagaaaaacaacttaaatgcgaaagtgggtcttaa

SEQ ID NO: 490 - DNA, 627 bp, Artificial Sequence
  Sulfonylurea responsive repressor
atgggatctagattagataaaagtaaagtgattaacagcgcattagagctgcttaatgaggtcggaatcgaaggtttaacaacccgtaaactcgcccagaagctaggtgtagagcagcctacattgtattggcatgtaaaaaataagcgagctctgctcgacgccttagccattgagatgatggataggcacgcaactcacatgtgccctttagaaggggaaagctggcaagattttttacgtaataatgctaaaagtatgagatgtgctttactaagccatcgcgatggagcaaaagtatgtttaggtacacgctggacagaaaaacattatgaaagtgctgaaaatatgttagcctttttatgccaacaaggtttttcactagagaatgcattatatgcagtgagtgctgtgagggtgtttactttaggttgcgtattgtttgatcaagagctccaagtcgctaaagaagaaagggaaacacctactactgctagtatgccgccattagtgcgacaagtttgggaattaaaggatcaccaaggtgcagagccagccttcttattcggccttgaattgatcatatgcggattagaaaaacaacttaaatgcgaaagtgggtcttaa

SEQ ID NO: 491 - DNA, 627 bp, Artificial Sequence
  Sulfonylurea responsive repressor
  misc_feature 194, 350: n = A,T,C or G
atgggatctagattagataaaagtaaagtgattaacagcgcattagagctgcttaatgaggtcggaatcgaaggtttaacaacccgtaaactcgcccagaagctaggtgtagagcagcctacattgtattggcatgtaaaaaataagcgagctctgctcgacgccttagccattgagatgatggataggcaccnaactcacttgtgccctttagaaggggaaagctggcaagattttttacgtaatactgctaaaagtatgagatgtgctttactaagccatcgcgatggagcaaaagtatgtttaggtacacgctggacagaacaattgtatgaagctgctgaaaatcnrttagcctttttatgccaacaaggtttttcactagagaatgcattatatgcaatgagtgctgtgagggtgtttactttaggttgcgtattgtttgatcaagagagccaagtcgctaaagaagaaagggaaacacctactactgctagtatgccgccattagtgcgacaagtttgggaattaaaggatcaccaaggtgcagagccagccttcttattcggccttgaattgatcatatgcggattagaaaaacaacttaaatgcgaaagtgggtcttaa

SEQ ID NO: 492 - DNA, 627 bp, Artificial Sequence
  Sulfonylurea responsive repressor
atgggatctagattagataaaagtaaagtgattaacagcgcattagagctgcttaatgaggtcggaatcgaaggtttaacaacccgtaaactcgcccagaagctaggtgtagagcagcctacattgtattggcatgtaaaaaataagcgagctctgctcgacgccttagccattgagatgatggataggcaccaaactcactattgccctttagaaggggaaagctggcaagattttttacgtaataatgctaaaagtatgagatgtgctttactaagccatcgcgatggagcaaaagtatgtttaggtacacgctggacagaacaacattatgaaggtgctgaaaatatgttagcctttttatgccaacaaggtttttcactagagaatgcattatatgcagtgagtgctgtgagggtgtttactttaggttgcgtattgtttgatcaagagagccaagtcgctaaagaagaaagggaaacacctactactgctagtatgccgccattattgcgacaagtttgggaattaaaggatcaccaaggtgcagagccagccttcttattcggccttgaattgatcatatgcggattagaaaaacaacttaaatgcgaaagtgggtcttaa

SEQ ID NO: 493 - DNA, 627 bp, Artificial Sequence
  Sulfonylurea responsive repressor
atgggatctagattagataaaagtaaagtgattaacagcgcattagagctgcttaatgaggtcggaatcgaaggtttaacaacccgtaaactcgcccagaagctaggtgtagagcagcctacattgtattggcatgtaaaaaataagcgagctctgctcgacgccttagccattgagatgatggataggcacgcaactcacatttgccctttagaaggggaaagctggcaagattttttacgtaataatgctaaaagtatgagatgtgctttactaagccatcgcgatggagcaaaagtatgtttaggtacacgctggacagaacaattgtatgaaagtgctgaaaatatgttagcctttttatgccaacaaggtttttcactagagaatgcattatatgcagtgagtgctgtgagggtgtttactttaggttgcgtattgtttgatcaagagagccaagtcgctaaagaagaaagggaaacacctactactgctagtatgccgccattagtgcgacaagtttgggaattaaaggatcaccaaggtgcagagccagccttcttattcggccttgaattgatcatatgcggattagaaaaacaacttaaatgcgaaagtgggtcttaa

SEQ ID NO: 494 - DNA, 627 bp, Artificial Sequence
  Sulfonylurea responsive repressor
atgggatctagattagataaaagtaaagtgattaacagcgcattagagctgcttaatgaggtcggaatcgaaggtttaacaacccgtaaactcgcccagaagctaggtgtagagcagcctacattgtattggcatgtaaaaaataagcgagctctgctcgacgccttagccattgagatgatggataggcaccaaactcactattgccctttagaaggggaaagctggcaagattttttacgtaataatgctaaaagtatgagatgtgctttactaagccatcgcgatggagcaaaagtatgtttaggtacacgctggacagaaaaacaatatgaaactgctgaaaatcaattagcctttttatgccaacaaggtttttcactagagaatgcattatatgcaatgagtgctgtgaggaactttactttaggttgcgtattgtttgatcaagagagccaagtcgctaaagaagaaagggaaacacctactactgctagtatgccgccattattgcgacaaggttgggaattaaaggatcaccaaggtgcagagccagccttcttattcggccttgaattgatcatatgcggattagaaaaacaacttaaatgcgaaagtgggtcttaa

SEQ ID NO: 495 - DNA, 627 bp, Artificial Sequence
  Sulfonylurea responsive repressor
atgggatctagattagataaaagtaaagtgattaacagcgcattagagctgcttaatgaggtcggaatcgaaggtttaacaacccgtaaactcgcccagaagctaggtgtagagcagcctacattgtattggcatgtaaaaaataagcgagctctgctcgacgccttagccattgagatgatggataggcaccaaactcactattgccctttagaaggggaaagctggcaagattttttacgtaataatgctaaaagtatgagatgtgctttactaagccatcgcgatggagcaaaagtatgtttaggtacacgctggacagaacaacattatgaaactgctgaaaatatgttagcctttttatgccaacaaggtttttcactagagaatgcattatatgcaatgagtgctgtgagggtgtttactttaggttgcgtattgtttgatcaagagagccaagtcgctaaagaagaaagggaaacacctactactgctagtatgccgccattattgcgacaaggttgggaattaaaggatcaccaaggtgcagagccagccttcttattcggccttgaattgatcatatgcggattagaaaaacaacttaaatgcgaaagtgggtcttaa

SEQ ID NO: 496 - DNA, 627 bp, Artificial Sequence
  Sulfonylurea responsive repressor
  misc_feature 338, 403: n = A,T,C or G
atgggatctagattagataaaagtaaagtgattaacagcgcattagagctgcttaatgaggtcggaatcgaaggtttaacaacccgtaaactcgcccagaagctaggtgtagagcagcctacattgtattggcatgtaaaaaataagcgagctctgctcgacgccttagccattgagatgatggataggcacccaactcacttgtgccctttagaaggggaaagctggcaagattttttacgtaatactgctaaaagtatgagatgtgctttactaagccatcgcgatggagcaaaagtatgtttaggtacacgctggacagaacaacwrtatgaagntgctgaaaatcwrttagcctttttatgccaacaaggtttttcactagagaatgcattatatgcantgagtgctgtgagggwgtttactttaggttgcgtattgtttgatcaagagatccaagtcgctaaagaagaaagggaaacacctactactgctagtatgccgccattagtgcgacaagcttgggaattaaaggatcaccaaggtgcagagccagccttcttattcggccttgaattgatcatatgcggattagaaaaacaacttaaatgcgaaagtgggtcttaa

SEQ ID NO: 497 - DNA, 627 bp, Artificial Sequence
  Sulfonylurea responsive repressor
atgggatctagattagataaaagtaaagtgattaacagcgcattagagctgcttaatgaggtcggaatcgaaggtttaacaacccgtaaactcgcccagaagctaggtgtagagcagcctacattgtattggcatgtaaaaaataagcgagctctgctcgacgccttagccattgagatgatggataggcacgcaactcacatttgccctttagaaggggaaagctggcaagattttttacgtaataatgctaaaagtatgagatgtgctttactaagccatcgcgatggagcaaaagtatgtttaggtacacgctggacagaacaaatgtatgaaactgctgaaaatcaattagcctttttatgccaacaaggtttttcactagagaatgcattatatgcaatgagtgctgtgagggtgtttactttaggttgcgtattgtttgatcaagagctccaagtcgctaaagaagaaagggaaacacctactactgctagtatgccgccattattgcgacaagtttgggaattaaaggatcaccaaggtgcagagccagccttcttattcggccttgaattgatcatatgcggattagaaaaacaacttaaatgcgaaagtgggtcttaa

SEQ ID NO: 498 - DNA, 627 bp, Artificial Sequence
  Sulfonylurea responsive repressor
atgggatctagattagataaaagtaaagtgattaacagcgcattagagctgcttaatgaggtcggaatcgaaggtttaacaacccgtaaactcgcccagaagctaggtgtagagcagcctacattgtattggcatgtaaaaaataagcgagctctgctcgacgccttagccattgagatgatggataggcaccaaactcacatttgccctttagaaggggaaagctggcaagattttttacgtaataatgctaaaagtatgagatgtgctttactaagccatcgcgatggagcaaaagtatgtttaggtacacgctggacagaaaaacattatgaaactgctgaaaatatgttagcctttttatgccaacaaggtttttcactagagaatgcattatatgcaatgagtgctgtgagggtgtttactttaggttgcgtattgtttgatcaagagagccaagtcgctaaagaagaaagggaaacacctactactgctagtatgccgccattagtgcgacaagtttgggaattaaaggatcaccaaggtgcagagccagccttcttattcggccttgaattgatcatatgcggattagaaaaacaacttaaatgcgaaagtgggtcttaa

SEQ ID NO: 499 - DNA, 627 bp, Artificial Sequence
  Sulfonylurea responsive repressor
atgggatctagattagataaaagtaaagtgattaacagcgcattagagctgcttaatgaggtcggaatcgaaggtttaacaacccgtaaactcgcccagaagctaggtgtagagcagcctacattgtattggcatgtaaaaaataagcgagctctgctcgacgccttagccattgagatgatggataggcaccaaactcacgtttgccctttagaaggggaaagctggcaagattttttacgtaatactgctaaaagtatgagatgtgctttactaagccatcgcgatggagcaaaagtatgtttaggtacacgctggacagaacaattgtatgaaactgctgaaaatatgttagcctttttatgccaacaaggtttttcactagagaatgcattatatgcagtgagtgctgtgagggtgtttactttaggttgcgtattgtttgatcaagagagccaagtcgctaaagaagaaagggaaacacctactactgctaggatgccgccattattgcgacaaggttgggaattaaaggatcaccaaggtgcagagccagccttcttattcggccttgaattgatcatatgcggattagaaaaacaacttaaatgcgaaagtgggtcttaa

SEQ ID NO: 500 - DNA, 627 bp, Artificial Sequence
  Sulfonylurea responsive repressor
atgggatctagattagataaaagtaaagtgattaacagcgcattagagctgcttaatgaggtcggaatcgaaggtttaacaacccgtaaactcgcccagaagctaggtgtagagcagcctacattgtattggcatgtaaaaaataagcgagctctgctcgacgccttagccattgagatgatggataggcaccaaactcactattgccctttagaaggggaaagctggcaagattttttacgtaatactgctaaaagtatgagatgtgctttactaagccatcgcgatggagcaaaagtatgtttaggtacacgctggacagaacaattgtatgaaagtgctgaaaatatgttagcctttttatgccaacaaggtttttcactagagaatgcattatatgcaatgagtgctgtgagggtgtttactttaggttgcgtattgtttgatcaagagctccaagtcgctaaagaagaaagggaaacacctactactgctagtatgccgccattattgcgacaaggttgggaattaaaggatcaccaaggtgcagagccagccttcttattcggccttgaattgatcatatgcggattagaaaaacaacttaaatgcgaaagtgggtcttaa

SEQ ID NO: 501 - DNA, 627 bp, Artificial Sequence
  Sulfonylurea responsive repressor
atgggatctagattagataaaagtaaagtgattaacagcgcattagagctgcttaatgaggtcggaatcgaaggtttaacaacccgtaaactcgcccagaagctaggtgtagagcagcctacattgtattggcatgtaaaaaataagcgagctctgctcgacgccttagccattgagatgatggataggcaccaaactcactattgccctttagaaggggaaagctggcaagattttttacgtaatactgctaaaagtatgagatgtgctttactaagccatcgcgatggagcaaaagtatgtttaggtacacgctggacagaaaaacaatatgaaactgctgaaaatcaattagcctttttatgccaacaaggtttttcactagagaatgcattatatgcagtgagtgctgtgagggtgtttactttaggttgcgtattgtttgatcaagagagccaagtcgctaaagaagaaagggaaacacctactactgctagtatgccgccattagtgcgacaagtttgggaattaaaggatcaccaaggtgcagagccagccttcttattcggccttgaattgatcatatgcggattagaaaaacaacttaaatgcgaaagtgggtcttaa

SEQ ID NO: 502 - DNA, 627 bp, Artificial Sequence
  Sulfonylurea responsive repressor
atgggatctagattagataaaagtaaagtgattaacagcgcattagagctgcttaatgaggtcggaatcgaaggtttaacaacccgtaaactcgcccagaagctaggtgtagagcagcctacattgtattggcatgtaaaaaataagcgagctctgctcgacgccttagccattgagatgatggataggcacgcaactcactattgccctttagaaggggaaagctggcaagattttttacgtaataatgctaaaagtatgagatgtgctttactaagccatcgcgatggagcaaaagtatgtttaggtacacgctggacagaacaacattatgaaactgctgaaaatcaattagcctttttatgccaacaaggtttttcactagagaatgcattatatgcaatgagtgctgtgagggtgtttactttaggttgcgtattgtttgatcaagagagccaagtcgctaaagaagaaagggaaacacctactactgctagtatgccgccattagtgcgacaaggttgggaattaaaggatcaccaaggtgcagagccagccttcttattcggccttgaattgatcatatgcggattagaaaaacaacttaaatgcgaaagtgggtcttaa

SEQ ID NO: 503 - DNA, 627 bp, Artificial Sequence
  Sulfonylurea responsive repressor
atgggatctagattagataaaagtaaagtgattaacagcgcattagagctgcttaatgaggtcggaatcgaaggtttaacaacccgtaaactcgcccagaagctaggtgtagagcagcctacattgtattggcatgtaaaaaataagcgagctctgctcgacgccttagccattgagatgatggataggcaccaaactcactattgccctttagaaggggaaagctggcaagattttttacgtaataatgctaaaagtatgagatgtgctttactaagccatcgcgatggagcaaaagtatgtttaggtacacgctggacagaaaaacattatgaaactgctgaaaatcaattagcctttttatgccaacaaggtttttcactagagaatgcattatatgcaatgagtgctgtgagggtgtttactttaggttgcgtattgtttgatcaagagagccaagtcgctaaagaagaaagggaaacacctactactgctagtatgccgccattattgcgacaagcttgggaattaaaggatcaccaaggtgcagagccagccttcttattcggccttgaattgatcatatgcggattagaaaaacaacttaaatgcgaaagtgggtcttaa

SEQ ID NO: 504 - DNA, 627 bp, Artificial Sequence
  Sulfonylurea responsive repressor
atgggatctagattagataaaagtaaagtgattaacagcgcattagagctgcttaatgaggtcggaatcgaaggtttaacaacccgtaaactcgcccagaagctaggtgtagagcagcctacattgtattggcatgtaaaaaataagcgagctctgctcgacgccttagccattgagatgatggataggcaccaaactcactattgccctttagaaggggaaagctggcaagattttttacgtaataatgctaaaagtatgagatgtgctttactaagccatcgcgatggagcaaaagtatgtttaggtacacgctggacagaacaacattatgaagctgctgaaaatatgttagcctttttatgccaacaaggtttttcactagagaatgcattatatgcagtgagtgctgtgagggtgtttactttaggttgcgtattgtttgatcaagagagccaagtcgctaaagaagaaagggaaacacctactactgctagtatgccgccattattgcgacaagtttgggaattaaaggatcaccaaggtgcagagccagccttcttattcggccttgaattgatcatatgcggattagaaaaacaacttaaatgcgaaagtgggtcttaa

SEQ ID NO: 505 - DNA, 627 bp, Artificial Sequence
  Sulfonylurea responsive repressor
atgggatctagattagataaaagtaaagtgattaacagcgcattagagctgcttaatgaggtcggaatcgaaggtttaacaacccgtaaactcgcccagaagctaggtgtagagcagcctacattgtattggcatgtaaaaaataagcgagctctgctcgacgccttagccattgagatgatggataggcaccaaactcactattgccctttagaaggggaaagctggcaagattttttacgtaataatgctaaaagtatgagatgtgctttactaagccatcgcgatggagcaaaagtatgtttaggtacacgctggacagaacaaatgtatgaagctgctgaaaatcaattagcctttttatgccaacaaggtttttcactagagaatgcattatatgcagtgagtgctgtgagggtgtttactttaggttgcgtattgtttgatcaagagctccaagtcgctaaagaagaaagggaaacacctactactgctagtatgccgccattagtgcgacaagtttgggaattaaaggatcaccaaggtgcagagccagccttcttattcggccttgaattgatcatatgcggattagaaaaacaacttaaatgcgaaagtgggtcttaa

SEQ ID NO: 506 - DNA, 627 bp, Artificial Sequence
  Sulfonylurea responsive repressor
atgggatctagattagataaaagtaaagtgattaacagcgcattagagctgcttaatgaggtcggaatcgaaggtttaacaacccgtaaactcgcccagaagctaggtgtagagcagcctacattgtattggcatgtaaaaaataagcgagctctgctcgacgccttagccattgagatgatggataggcaccaaactcactattgccctttagaaggggaaagctggcaagattttttacgtaataatgctaaaagtatgagatgtgctttactaagccatcgcgatggagcaaaagtatgtttaggtacacgctggacagaaaaattgtatgaagctgctgaaaatatgttagcctttttatgccaacaaggtttttcactagagaatgcattatatgcagtgagtgctgtgagggtgtttactttaggttgcgtattgtttgatcaagagagccaagtcgctaaagaagaaagggaaacacctactactgctagtatgccgccattagtgcgacaagtttgggaattaaaggatcaccaaggtgcagagccagccttcttattcggccttgaattgatcatatgcggattagaaaaacaacttaaatgcgaaagtgggtcttaa

SEQ ID NO: 507 - DNA, 627 bp, Artificial Sequence
  Sulfonylurea responsive repressor
  misc_feature 418, 419: n = A,T,C or G
atgggatctagattagataaaagtaaagtgattaacagcgcattagagctgcttaatgaggtcggaatcgaaggtttaacaacccgtaaactcgcccagaagctaggtgtagagcagcctacattgtattggcatgtaaaaaataagcgagctctgctcgacgccttagccattgagatgatggataggcaccaaactcactattgccctttagaaggggaaagctggcaagattttttacgtaatactgctaaaagtatgagatgtgctttactaagccatcgcgatggagcaaaagtatgtttaggtacacgctggacagaacaaatgtatgaagctgctgaaaatatgttagcctttttatgccaacaaggtttttcactagagaatgcattatatgcaatgagtgctgtgaggnngtttactttaggttgcgtattgtttgatcaagagagccaagtcgctaaagaagaaagggaaacacctactactgctagtatgccgccattagtgcgacaagcttgggaattaaaggatcaccaaggtgcagagccagccttcttattcggccttgaattgatcatatgcggattagaaaaacaacttaaatgcgaaagtgggtcttaa

SEQ ID NO: 508 - DNA, 627 bp, Artificial Sequence
  Sulfonylurea responsive repressor
  misc_feature 219, 337, 418: n = A,T,C or G
atgggatctagattagataaaagtaaagtgattaacagcgcattagagctgcttaatgaggtcggaatcgaaggtttaacaacccgtaaactcgcccagaagctaggtgtagagcagcctacattgtattggcatgtaaaaaataagcgagctctgctcgacgccttagccattgagatgatggataggcacgcaactcactattgccctttagaaggngaaagctggcaagattttttacgtaataatgctaaaagtatgagatgtgctttactaagccatcgcgatggagcaaaagtatgtttaggtacacgctggacagaacaactgtatgaanctgctgaaaatcaattagcctttttatgccaacaaggtttttcactagagaatgcattatatgcaatgagtgctgtgaggnwgtttactttaggttgcgtattgtttgatcaagagagccaagtcgctaaagaagaaagggaaacacctactactgctagtatgccgccattagtgcgacaaggttgggaattaaaggatcaccaaggtgcagagccagccttcttattcggccttgaattgatcatatgcggattagaaaaacaacttaaatgcgaaagtgggtcttaa

SEQ ID NO: 509 - DNA, 627 bp, Artificial Sequence
  Sulfonylurea responsive repressor
atgggatctagattagataaaagtaaagtgattaacagcgcattagagctgcttaatgaggtcggaatcgaaggtttaacaacccgtaaactcgcccagaagctaggtgtagagcagcctacattgtattggcatgtaaaaaataagcgagctctgctcgacgccttagccattgagatgatggataggcaccaaactcactattgccctttagaaggggaaagctggcaagattttttacgtaatactgctaaaagtatgagatgtgctttactaagccatcgcgatggagcaaaagtatgtttaggtacacgctggacagaaaaacaatatgaaagtgctgaaaatcaattagcctttttatgccaacaaggtttttcactagagaatgcattatatgcaatgagtgctgtgagggtgtttactttaggttgcgtattgtttgatcaagagagccaagtcgctaaagaagaaagggaaacacctactactgctagtatgccgccattagtgcgacaaggttgggaattaaaggatcaccaaggtgcagagccagccttcttattcggccttgaattgatcatatgcggattagaaaaacaacttaaatgcgaaagtgggtcttaa

SEQ ID NO: 510 - DNA, 627 bp, Artificial Sequence
  Sulfonylurea responsive repressor
atgggatctagattagataaaagtaaagtgattaacagcgcattagagctgcttaatgaggtcggaatcgaaggtttaacaacccgtaaactcgcccagaagctaggtgtagagcagcctacattgtattggcatgtaaaaaataagcgagctctgctcgacgccttagccattgagatgatggataggcaccaaactcactattgccctttagaaggggaaagctggcaagattttttacgtaataatgctaaaagtatgagatgtgctttactaagccatcgcgatggagcaaaagtatgtttaggtacacgctggacagaacaacattatgaagctgctgaaaatcaattagcctttttatgccaacaaggtttttcactagagaatgcattatatgcagtgagtgctgtgagggtgtttactttaggttgcgtattgtttgatcaagagagccaagtcgctaaagaagaaagggaaacacctactactgctagtatgccgccattagtgcgacaagtttgggaattaaaggatcaccaaggtgcagagccagccttcttattcggccttgaattgatcatatgcggattagaaaaacaacttaaatgcgaaagtgggtcttaa

SEQ ID NO: 511 - DNA, 627 bp, Artificial Sequence
  Sulfonylurea responsive repressor
atgggatctagattagataaaagtaaagtgattaacagcgcattagagctgcttaatgaggtcggaatcgaaggtttaacaacccgtaaactcgcccagaagctaggtgtagagcagcctacattgtattggcatgtaaaaaataagcgagctctgctcgacgccttagccattgagatgatggataggcacgcaactcactattgccctttagaaggggaaagctggcaagattttttacgtaatactgctaaaagtatgagatgtgctttactaagccatcgcgatggagcaaaagtatgtttaggtacacgctggacagaacaacattatgaaagtgctgaaaatatgttagcctttttatgccaacaaggtttttcactagagaatgcattatatgcagtgagtgctgtgagggtgtttactttaggttgcgtattgtttgatcaagagagccaagtcgctaaagaagaaagggaaacacctactactgctagtatgccgccattagtgcgacaagcttgggaattaaaggttcaccaaggtgcagagccagccttcttattcggccttgaattgatcatatgcggattagaaaaacaacttaaatgcgaaagtgggtcttaa

SEQ ID NO: 512 - DNA, 627 bp, Artificial Sequence
  Sulfonylurea responsive repressor
atgggatctagattagataaaagtaaagtgattaacagcgcattagagctgcttaatgaggtcggaatcgaaggtttaacaacccgtaaactcgcccagaagctaggtgtagagcagcctacattgtattggcatgtaaaaaataagcgagctctgctcgacgccttagccattgagatgatggataggcacgcaactcactattgccctttagaaggggaaagctggcaagattttttacgtaataatgctaaaagtatgagatgtgctttactaagccatcgcgatggagcaaaagtatgtttaggtacacgctggacagaacaacattatgaaagtgctgaaaatcaattagcctttttatgccaacaaggtttttcactagagaatgcattatatgcagtgagtgctgtgagggtgtttactttaggttgcgtattgtttgatcaagagctccaagtcgctaaagaagaaagggaaacacctactactgctagtatgccgccattattgcgacaagtttgggaattaaaggatcaccaaggtgcagagccagccttcttattcggccttgaattgatcatatgcggattagaaaaacaacttaaatgcgaaagtgggtcttaa

SEQ ID NO: 513 - DNA, 627 bp, Artificial Sequence
  Sulfonylurea responsive repressor
atgggatctagattagataaaagtaaagtgattaacagcgcattagagctgcttaatgaggtcggaatcgaaggtttaacaacccgtaaactcgcccagaagctaggtgtagagcagcctacattgtattggcatgtaaaaaataagcgagctctgctcgacgccttagccattgagatgatggataggcacgcaactcactattgccctttagaaggggaaagctggcaagattttttacgtaatactgctaaaagtatgagatgtgctttactaagccatcgcgatggagcaaaagtatgtttaggtacacgctggacagaaaaacaatatgaagctgctgaaaatcaattagcctttttatgccaacaaggtttttcactagagaatgcattatatgcagtgagtgctgtggggaactttactttaggttgcgtattgtttgatcaagagctccaagtcgctaaagaagaaagggaaacacctactactgctagtatgccgccattagtgcgacaagctttggaattaaaggatcaccaaggtgcagagccagccttcttattcggccttgaattgatcatatgcggattagaaaaacaacttaaatgcgaaagtgggtcttaa

SEQ ID NO: 514 - DNA, 627 bp, Artificial Sequence
  Sulfonylurea responsive repressor
atgggatctagattagataaaagtaaagtgattaacagcgcattagagctgcttaatgaggtcggaatcgaaggtttaacaacccgtaaactcgcccagaagctaggtgtagagcagcctacattgtattggcatgtaaaaaataagcgagctctgctcgacgccttagccattgagatgatggataggcacgcaactcactattgccctttagaaggggaaagctggcaagattttttacgtaatactgctaaaagtatgagatgtgctttactaagccatcgcgatggagcaaaagtatgtttaggtacacgctggacagaacaacaatatgaaactgctgaaaatcaattagcctttttatgccaacaaggtttttcactagagaatgcattatatgcaatgagtgctgtgaggaactttactttaggttgcgtattgtttgatcaagagagccaagtcgctaaagaagaaagggaaacacctactactgctagtatgccgccattattgcgacaagcttgggaattaaaggatcaccaaggtgcagagccagccttcttattcggccttgaattgatcatatgcggattagaaaaacaacttaaatgcgaaagtgggtcttaa

SEQ ID NO: 515 - DNA, 627 bp, Artificial Sequence
  Sulfonylurea responsive repressor
  misc_feature 200, 314, 368, 413, 437, 458, 542: n = A,T,C or G
atgggatctagattagataaaagtaaagtgattaacagcgcattagagctgcttaatgaggtcggaatcgaaggtttaacaacccgtaaactcgcccagaagctaggtgtagagcagcctacattgtattggcatgtaaaaaataagcgagctctgctcgacgccttagccattgagatgatggataggcacgcaactcnctattgccctttagaaggggaaagctggcaagattttttacgtaataatgctaaaagtatgagatgtgctttactaagccatcgcgatggagcaaaagtatgtttaggtacacnctggacagaaaaacattatgaaactgctgaaaatcaattagcctttttatgccnacaaggtttttcactagagaatgcattatatgcaatgagtgctgngagggtgtttactttaggttgcgnattgtttgatcaagagctccnagtcgctaaagaagaaagggaaacacctactactgctagtatgccgccattattgcgacaaggttgggaattaaaggatcaccnaggtgcagagccagccttcttattcggccttgaattgatcatatgcggattagaaaaacaacttaaatgcgaaagtgggtcttaa

SEQ ID NO: 516 - DNA, 627 bp, Artificial Sequence
  Sulfonylurea responsive repressor
atgggatctagattagataaaagtaaagtgattaacagcgcattagagctgcttaatgaggtcggaatcgaaggtttaacaacccgtaaactcgcccagaagctaggtgtagagcagcctacattgtattggcatgtaaaaaataagcgagctctgctcgacgccttagccattgagatgatggataggcaccaaactcacttgtgccctttagaaggggaaagctggcaagattttttacgtaatactgctaaaagtatgagatgtgctttactaagccatcgcgatggagcaaaagtatgtttaggtacacsctggacagaaaaaatgtatgaaagtgctgaaaatatgttagcctttttatgccaacaaggtttttcactagagaatgcattatatgcagtgagtgctgtgagggtgtttactttaggttgcgtattgtttgatcaagagctccaagtcgctaaagaagaaagggaaacacctactactgctagtatgccgccattattgcgacaagtttgggaattaaaggatcaccaaggtgcagagccagccttcttattcggccttgaattgatcatatgcggattagaaaaacaacttaaatgcgaaagtgggtcttaa

SEQ ID NO: 517 - DNA, 627 bp, Artificial Sequence
  Sulfonylurea responsive repressor
atgggatctagattagataaaagtaaagtgattaacagcgcattagagctgcttaatgaggtcggaatcgaaggtttaacaacccgtaaactcgcccagaagctaggtgtagagcagcctacattgtattggcatgtaaaaaataagcgagctctgctcgacgccttagccattgagatgatggataggcaccaaactcacatgtgccctttagaaggggaaagctggcaagattttttacgtaataatgctaaaagtatgagatgtgctttactaagccatcgcgatggagcaaaagtatgtttaggtacacgctggacagaaaaaatgtatgaaagtgctgaaaatatgttagcctttttatgccaacaaggtttttcactagagaatgcattatatgcaatgagtgctgtgagggtgtttactttaggttgcgtattgtttgatcaagagagccaagtcgctaaagaagaaagggaaacacctactwctrctagtatgycgccattagtgcgacaagcttgggaattaaaggatcaccaaggtgcagagccagccttcttattcggccttgaattgatcatatgcggattagaaaaacaacttaaatgcgaaagtgggtcttaa

SEQ ID NO: 518 - DNA, 627 bp, Artificial Sequence
  Sulfonylurea responsive repressor
atgggatctagattagataaaagtaaagtgattaacagcgcattagagctgcttaatgaggtcggaatcgaaggtttaacaacccgtaaactcgcccagaagctaggtgtagagcagcctacattgtattggcatgtaaaaaataagcgagctctgctcgacgccttagccattgagatgatggataggcacgcaactcacatttgccctttagaaggggaaagctggcaagattttttacgtaatactgctaaaagtatgagatgtgctttactaagccatcgcgatggagcaaaagtatgtttaggtacacgctggacagaacaacattatgaaagtgctgaaaatcaattagcctttttatgccaacaaggtttttcactagagaatgcattatatgcagtgagtgctgtgagggtgtttactttaggttgcgtattgtttgatcaagagagccaagtcgctaaagaagaaagggaaacacctactactgctagtatgccgccattattgcgacaagtttgggaattaaaggatcaccaaggtgcagagccagccttcttattcggccttgaattgatcatatgcggattagaaaaacaacttaaatgcgaaagtgggtcttaa

SEQ ID NO: 519 - DNA, 627 bp, Artificial Sequence
  Sulfonylurea responsive repressor
  misc_feature 303, 329, 330, 512: n = A,T,C or G
atgggatctagattagataaaagtaaagtgattaacagcgcattagagctgcttaatgaggtcggaatcgaaggtttaacaacccgtaaactcgcccagaagctaggtgtagagcagcctacattgtattggcatgtaaaaaataagcgagctctgctcgacgccttagccattgagatgatggataggcaccaaactcactattgccctttagaaggggaaagctggcaagattttttacgtaatactgctaaaagtatgagatgtgctttactaagccatcgcgatggagcaaaagtatgnttaggtacacgctggacagaaaaacnntatgaagstgctgaaaatcaattagcctttttatgccaacaaggtttttcactagagaatgcattatatgcaatsagtgctgtgagggtgtttactttaggttgcgtattgtttgatcaagagagccaagtcgctaaagaagaaagggaaacacctactactgctagtatgccgccattagnscgacaagkttgggaattaaaggatcaccaaggtgcagagccagccttcttattcggccttgaattgatcatatgcggattagaaaaacaacttaaatgcgaaagtgggtcttaa

SEQ ID NO: 520 - DNA, 627 bp, Artificial Sequence
  Sulfonylurea responsive repressor
  misc_feature 194, 204, 418, 419, 521: n = A,T,C or G
atgggatctagattagataaaagtaaagtgattaacagcgcattagagctgcttaatgaggtcggaatcgaaggtttaacaacccgtaaactcgcccagaagctaggtgtagagcagcctacattgtattggcatgtaaaaaataagcgagctctgctcgacgccttagccattgagatgatggataggcaccnaactcactantgccctttagaaggggaaagctggcaagattttttacgtaatactgctaaaagtatgagatgtgctttactaagccatcgcgatggagcaaaagtatgtttaggtacacgctggacagaacaacattatgaagctgctgaaaatctgttagcctttttatgccaacaaggtttttcactagagaatgcattatatgcaatgagtgctgtgaggnngtttactttaggttgcgtattgtttgatcaagagctccaagtcgctaaagaagaaagggaaacacctactactgctagtatkccgccattagtgcgacaagnttgggaattaaaggatcaccaaggtgcagagccagccttcttattcggccttgaattgatcatatgcggattagaaaaacaacttaaatgcgaaagtgggtcttaa

SEQ ID NO: 521 - DNA, 627 bp, Artificial Sequence
  Sulfonylurea responsive repressor
atgggatctagattagataaaagtaaagtgattaacagcgcattagagctgcttaatgaggtcggaatcgaaggtttaacaacccgtaaactcgcccagaagctaggtgtagagcagcctacattgtattggcatgtaaaaaataagcgagctctgctcgacgccttagccattgagatgatggataggcacgcaactcacgtttgccctttagaaggggaaagctggcaagattttttacgtaataatgctaaaagtatgagatgtgctttactaagccatcgcgatggagcaaaagtatgtttaggtacacgctggacagaacaacaatatgaaactgctgaaaatatgttagcctttttatgccaacaaggtttttcactagagaatgcattatatgcagtgagtgctgtgaggaactttactttaggttgcgtattgtttgatcaagagagccaagtcgctaaagaagaaagggaaacacctactactgctagtatgccgccattattgcgacaaggttgggaattaaaggatcaccaaggtgcagagccagccttcttattcggccttgaattgatcatatgcggattagaaaaacaacttaaatgcgaaagtgggtcttaa

SEQ ID NO: 522 - DNA, 627 bp, Artificial Sequence
  Sulfonylurea responsive repressor
atgggatctagattagataaaagtaaagtgattaacagcgcattagagctgcttaatgaggtcggaatcgaaggtttaacaacccgtaaactcgcccagaagctaggtgtagagcagcctacattgtattggcatgtaaaaaataagcgagctctgctcgacgccttagccattgagatgatggataggcacgcaactcactattgccctttagaaggggaaagctggcaagattttttacgtaataatgctaaaagtatgagatgtgctttactaagccatcgcgatggagcaaaagtatgtttaggtacacgctggacagaacaacattatgaaactgctgaaaatatgttagcctttttatgccaacaaggtttttcactagagaatgcattatatgcagtgagtgctgtgaggaactttactttaggttgcgtattgtttgatcaagagctccaagtcgctaaagaagaaagggaaacacctactactgctagtatgccgccattagtgcgacaagcttgggaattaaaggatcaccaaggtgcagagccagccttcttattcggccttgaattgatcatatgcggattagaaaaacaacttaaatgcgaaagtgggtcttaa

SEQ ID NO: 523 - DNA, 627 bp, Artificial Sequence
  Sulfonylurea responsive repressor
atgggatctagattagataaaagtaaagtgattaacagcgcattagagctgcttaatgaggtcggaatcgaaggtttaacaacccgtaaactcgcccagaagctaggtgtagagcagcctacattgtattggcatgtaaaaaataagcgagctctgctcgacgccttagccattgagatgatggataggcaccaaactcacttttgccctttagaaggggaaagctggcaagattttttacgtaataatgctaaaagtatgagatgtgctttactaagccatcgcgatggagcaaaagtatgtttaggtacacgctggacagaacaaatgtatgaaactgctgaaaatatgttagcctttttatgccaacaaggtttttcactagagaatgcattatatgcaatgagtgctgtgagggtgtttactttaggttgcgtattgtttgatcaagagagccaagtcgctaaagaagaaagggaaacacctactactgctagtatgcccccattagtgcgacaaggttgggaattaaaggatcaccaaggtgcagagccagccttcttattcggccttgaattgatcatatgcggattagaaaaacaacttaaatgcgaaagtgggtcttaa

SEQ ID NO: 524 - DNA, 627 bp, Artificial Sequence
  Sulfonylurea responsive repressor
atgggatctagattagataaaagtaaagtgattaacagcgcattagagctgcttaatgaggtcggaatcgaaggtttaacaacccgtaaactcgcccagaagctaggtgtagagcagcctacattgtattggcatgtaaaaaataagcgagctctgctcgacgccttagccattgagatgatggataggcacgcaactgactattgccctttagaaggggaaagctggcaagattttttacgtaataatgctaaaagtatgagatgtgctttactaagccatcgcgatggagcaaaagtatgtttaggtacacgctggacagaaaaacaatatgaaactgctgaaaatatgttagcctttttatgccaacaaggtttttcactagagaatgcattatatgcagtgagtgctgtgagggtgtttactttaggttgcgtattgtttgatcaagagagccaagtcgctwaagaagaaagggaaacacctmctactgctagtatrccgccattagtgcgacaagtttgggaattaaaggatcaccaaggtgcagagccagccttcttattcggccttgaattgatcatatgcggattagaaaaacaacttaaatgcgaaagtgggtcttaa

SEQ ID NO: 525 - DNA, 627 bp, Artificial Sequence
  Sulfonylurea responsive repressor
atgggatctagattagataaaagtaaagtgattaacagcgcattagagctgcttaatgaggtcggaatcgaaggtttaacaacccgtaaactcgcccagaagctaggtgtagagcagcctacattgtattggcatgtaaaaaataagcgagctctgctcgacgccttagccattgagatgatggataggcaccaaactcactattgccctttagaaggggaaagctggcaagattttttacgtaataatgctaaaagtatgagatgtgctttactaagccatcgcgatggagcaaaagtatgtttaggtacacgctggacagaacaattgtatgaaactgctgaaaatcaattagcctttttatgccaacaaggtttttcactagagaatgcattatatgcaatgagtgctgtgagggtgtttactttaggttgcgtattgtttgatcaagagagccaagtcgctaaagaagaaagggaaacacctactactgctagtatgccgccattagtgcgacaagcttgggaattaaaggatcaccaaggtgcagagccagccttcttattcggccttgaattgatcatatgcggattagaaaaacaacttaaatgcgaaagtgggtcttaa

SEQ ID NO: 526 - DNA, 627 bp, Artificial Sequence
  Sulfonylurea responsive repressor
atgggatctagattagataaaagtaaagtgattaacagcgcattagagctgcttaatgaggtcggaatcgaaggtttaacaacccgtaaactcgcccagaagctaggtgtagagcagcctacattgtattggcatgtaaaaaataagcgagctctgctcgacgccttagccattgagatgatggataggcaccaaactcacgtgtgccctttagaaggggaaagctggcaagattttttacgtaataatgctaaaagtatgagatgtgctttactaagccatcgcgatggagcaaaagtatgtttaggtacacgctggacagaacaacattatgaagctgctgaaaatatgttagcctttttatgccaacaaggtttttcactagagaatgcattatatkcaatgagtgctgtgagggtgtttactttaggttgcgtattgtttgatcaagagctccaagtcgctaaagaagaaagggaaacacctactactgctagtatgccgccattagtgcgacaagcttgggaattaaaggatcaccaaggtgcagagccagccttcttattcggccttgaattgatcatatgcggattagaaaaacaacttaaatgcgaaagtgggtcttaa

SEQ ID NO: 527 - DNA, 627 bp, Artificial Sequence
  Sulfonylurea responsive repressor
atgggatctagattagataaaagtaaagtgattaacagcgcattagagctgcttaatgaggtcggaatcgaaggtttaacaacccgtaaactcgcccagaagctaggtgtagagcagcctacattgtattggcatgtaaaaaataagcgagctctgctcgacgccttagccattgagatgatggataggcaccaaactcacttttgccctttagaaggggaaagctggcaagattttttacgtaataatgctaaaagtatgagatgtgctttactaagccatcgcgatggagcaaaagtatgtttaggtacacgctggacagaacaacaatatgaaagtgctgaaaatcaattagcctttttatgccaacaaggtttttcactagagaatgcattatatgcaatgagtgctgtgagggtgtttactttaggttgcgtattgtttgatcaagagagccaagtcgctaaagaagaaagggaaacacctactactgctagtatgccgccattattgcgacaaggtttggaattaaaggatcaccaaggtgcagagccagccttcttattcggccttgaattgatcatatgcggattagaaaaacaacttaaatgcgaaagtgggtcttaa

SEQ ID NO: 528 - DNA, 627 bp, Artificial Sequence
  Sulfonylurea responsive repressor
atgggatctagattagataaaagtaaagtgattaacagcgcattagagctgcttaatgaggtcggaatcgaaggtttaacaacccgtaaactcgcccagaagctaggtgtagagcagcctacattgtattggcatgtaaaaaataagcgagctctgctcgacgccttagccattgagatgatggataggcaccaaactcacttgtgccctttagaaggggaaagctggcaagattttttacgtaataatgctaaaagtatgagatgtgctttactaagccatcgcgatggagcaaaagtatgtttaggtacacgctggacagaacaattgtatgaaactgctgaaaatatgttagcctttttatgccaacaaggtttttcactagagaatgcattatatgcaatgagtgctgtgagggtgtttactttaggttgcgtattgtttgatcaagagagccaagtcgctaaagaagaaagggaaacacctactactgctagtatgccgccattattgcgacaaggttgggaattaaaggatcaccaaggtgcagagccagccttcttattcggccttgaattgatcatatgcggattagaaaaacaacttaaatgcgaaagtgggtcttaa

SEQ ID NO: 529 - DNA, 627 bp, Artificial Sequence
  Sulfonylurea responsive repressor
atgggatctagattagataaaagtaaagtgattaacagcgcattagagctgcttaatgaggtcggaatcgaaggtttaacaacccgtaaactcgcccagaagctaggtgtagagcagcctacattgtattggcatgtaaaaaataagcgagctctgctcgacgccttagccattgagatgatggataggcaccaaactcactattgccctttagaaggggaaagctggcaagattttttacgtaatactgctaaaagtatgagatgtgctttactaagccatcgcgatggagcaaaagtatgtttaggtacacgctggacagaaaaattgtatgaaactgctgaaaatatgttagcctttttatgccaacaaggtttttcactagagaatgcattatatgcaatgagtgctgtgagggtgtttactttaggttgcgtattgtttgatcaagagagccaagtcgctaaagaagaaagggaaacacctactactgctagtatgccgccattattgcgacaagcttgggaattaaaggatcaccaaggtgcagagccagccttcttattcggccttgaattgatcatatgcggattagaaaaacaacttaaatgcgaaagtgggtcttaa

SEQ ID NO: 530 - DNA, 627 bp, Artificial Sequence
  Sulfonylurea responsive repressor
atgggatctagattagataaaagtaaagtgattaacagcgcattagagctgcttaatgaggtcggaatcgaaggtttaacaacccgtaaactcgcccagaagctaggtgtagagcagcctacattgtattggcatgtaaaaaataagcgagctctgctcgacgccttagccattgagatgatggataggcaccaaactcactattgccctttagaaggggaaagctggcaagattttttacgtaataatgctaaaagtatgagatgtgctttactaagccatcgcgatggagcaaaagtatgtttaggtacacgctggacagaaaaacaatatgaaactgctgaaaatatgttagcctttttatgccaacaaggtttttcactagagaatgcattatatgcaatgagtgctgtgagggtgtttactttaggttgcgtattgtttgatcaagagctccaagtcgctaaagaagaaagggaaacacctactactgctagtatgccgccattattgcgacaagtttgggaattaaaggatcaccaaggtgcagagccagccttcttattcggccttgaattgatcatatgcggattagaaaaacaacttaaatgcgaaagtgggtcktaa

SEQ ID NO: 531 - DNA, 627 bp, Artificial Sequence
  Sulfonylurea responsive repressor
atgggatctagattagataaaagtaaagtgattaacagcgcattagagctgcttaatgaggtcggaatcgaaggtttaacaacccgtaaactcgcccagaagctaggtgtagagcagcctacattgtattggcatgtaaaaaataagcgagctctgctcgacgccttagccattgagatgatggataggcaccaaactcactattgccctttagaaggggaaagctggcaagattttttacgtaatactgctaaaagtatgagatgtgctttactaagccatcgcgatggagcaaaagtatgtttaggtacacgctggacagaacaaatgtatgaaagtgctgaaaatcaattagcctttttatgccaacaaggtttttcactagagaatgcattatatgcagtgagtgctgtgagggtgtttactttaggttgcgtattgtttgatcaagagctccaagtcgctaaagaagaaagggaaacacctactactgctagtatgccgccattattgcgacaagcttgggaattaaaggatcaccaaggtgcagagccagccttcttattcggccttgaattgatcatatgcggattagaaaaacaacttaaatgcgaaagtgggtcttaa

SEQ ID NO: 532 - DNA, 627 bp, Artificial Sequence
  Sulfonylurea responsive repressor
atgggatctagattagataaaagtaaagtgattaacagcgcattagagctgcttaatgaggtcggaatcgaaggtttaacaacccgtaaactcgcccagaagctaggtgtagagcagcctacattgtattggcatgtaaaaaataagcgagctctgctcgacgccttagccattgagatgatggataggcaccaaactcactattgccctttagaaggggaaagctggcaagattttttacgtaatactgctaaaagtatgagatgtgctttactaagccatcgcgatggagcaaaagtatgtttaggtacacgctggacagaaaaacaatatgaaactgctgaaaatatgttagcctttttatgccaacaaggtttttcactagagaatgcattatatgcaatgagtgctgtgagggtgtttactttaggttgcgtattgtttgatcaagagagccaagtcgctaaagaagaaagggaaacacctactactgctagtatgccgccattattgcgacaaggttgggaattaaaggatcaccaaggtgcagagccagccttcttattcggccttgaattgatcatatgcggattagaaaaacaacttaaatgcgaaagtgggtcttaa

SEQ ID NO: 533 - DNA, 627 bp, Artificial Sequence; identical to SEQ ID NO: 505
  Sulfonylurea responsive repressor

SEQ ID NO: 534 - DNA, 627 bp, Artificial Sequence
  Sulfonylurea responsive repressor
atgggatctagattagataaaagtaaagtgattaacagcgcattagagctgcttaatgaggtcggaatcgaaggtttaacaacccgtaaactcgcccagaagctaggtgtagagcagcctacattgtattggcatgtaaaaaataagcgagctctgctcgacgccttagccattgagatgatggataggcaccaaactcactattgccctttagaaggggaaagctggcaagattttttacgtaataatgctaaaagtatgagatgtgctttactaagccatcgcgatggagcaaaagtatgtttaggtacacgctggacagaaaaacaatatgaaagtgctgaaaatatgttagcctttttatgccaacaaggtttttcactagagaatgcattatatgcagtgagtgctgtgagggtgtttactttaggttgcgtattgtttgatcaagagagccaagtcgctaaagaagaaagggaaacacctactactgctagtatgccgccattattgcgacaagcttgggaattaaaggatcaccaaggtgcagagccagccttcttattcggccttgaattgatcatatgcggattagaaaaacaacttaaatgcgaaagtgggtcttaa

SEQ ID NO: 535 - DNA, 627 bp, Artificial Sequence
  Sulfonylurea responsive repressor
atgggatctagattagataaaagtaaagtgattaacagcgcattagagctgcttaatgaggtcggaatcgaaggtttaacaacccgtaaactcgcccagaagctaggtgtagagcagcctacattgtattggcatgtaaaaaataagcgagctctgctcgacgccttagccattgagatgatggataggcaccaaactcacttgtgccctttagaaggggaaagctggcaagattttttacgtaataatgctaaaagtatgagatgtgctttactaagccatcgcgatggagcaaaagtatgtttaggtacacgctggacagaacaattgtatgaaagtgctgaaaatcaattagcctttttatgccaacaaggtttttcactagagaatgcattatatgcagtgagtgctgtgagggtgtttactttaggttgcgtattgtttgatcaagagagccaagtcgctaaagaagaaagggaaacacctactactgctagtatgccgccattattgcgacaagcttgggaattaaaggatcaccaaggtgcagagccagccttcttattcggccttgaattgatcatatgcggattagaaaaacaacttaaatgcgaaagtgggtcttaa

SEQ ID NO: 536 - DNA, 627 bp, Artificial Sequence
  Sulfonylurea responsive repressor
atgggatctagattagataaaagtaaagtgattaacagcgcattagagctgcttaatgaggtcggaatcgaaggtttaacaacccgtaaactcgcccagaagctaggtgtagagcagcctacattgtattggcatgtaaaaaataagcgagctctgctcgacgccttagccattgagatgatggataggcacgcaactcacttgtgccctttagaaggggaaagctggcaagattttttacgtaataatgctaaaagtatgagatgtgctttactaagccatcgcgatggagcaaaagtatgtttaggtacacgctggacagaaaaacaatatgaaactgctgaaaatatgttagcctttttatgccaacaaggtttttcactagagaatgcattatatgcagtgagtgctgtgagggtgtttactttaggttgcgtattgtttgatcaagagagccaagtcgctaaagaagaaagggaaacacctactactgctagtatgccgccattattgcgacaagtttgggaattaaaggatcaccaaggtgcagagccagccttcttattcggccttgaattgatcatatgcggattagaaaaacaacttaaatgcgaaagtgggtcttaa

SEQ ID NO: 537 - DNA, 627 bp, Artificial Sequence
  Sulfonylurea responsive repressor
atgggatctagattagataaaagtaaagtgattaacagcgcattagagctgcttaatgaggtcggaatcgaaggtttaacaacccgtaaactcgcccagaagctaggtgtagagcagcctacattgtattggcatgtaaaaaataagcgagctctgctcgacgccttagccattgagatgatggataggcacgcaactcacttttgccctttagaaggggaaagctggcaagattttttacgtaataatgctaaaagtatgagatgtgctttactaagccatcgcgatggagcaaaagtatgtgtaggtacacgctggacagaacaaatgtatgaagctgctgaaaatcaattagcctttttatgccaacaaggtttttcactagagaatgcattatatgcagtgagtgctgtgagggtgtttactttaggttgcgtattgtttgatcaagagctccaagtcgctaaagaagaaagggaaacacctactactrctagtatkccgccattagtgcgacaagcttgggaattaaaggatcaccaaggtgcagagccagccttcttattcggccttgaattgatcatatgcggattagaaaaacaacttaaatgcgaaagtgggtcttaa

SEQ ID NO: 538 - DNA, 627 bp, Artificial Sequence
  Sulfonylurea responsive repressor
atgggatctagattagataaaagtaaagtgattaacagcgcattagagctgcttaatgaggtcggaatcgaaggtttaacaacccgtaaactcgcccagaagctaggtgtagagcagcctacattgtattggcatgtaaaaaataagcgagctctgctcgacgccttagccattgagatgatggataggcaccaaactcacatttgccctttagaaggggaaagctggcaagattttttacgtaataatgctaaaagtatgagatgtgctttactaagccatcgcgatggagcaaaagtatgtgtaggtacacgctggacagaaaaacattatgaaagtgctgaaaatatgttagcctttttatgccaacaaggtttttcactagagaatgcattatatgcagtgagtgctgtgagggtgtttactttaggttgcgtattgtttgatcaagagagccaagtcgctaaagaagaaagggaaacacctactactgctagtatgccgccattattgcgacaagcttgggaattaaaggatcaccaaggtgcagagccagccttcttattcggccttgaattgatcatatgcggattagaaaaacaacttaaatgcgaaagtgggtcttaa

SEQ ID NO: 539 - DNA, 627 bp, Artificial Sequence
  Sulfonylurea responsive repressor
  misc_feature 303, 349, 418, 454, 524: n = A,T,C or G
atgggatctagattagataaaagtaaagtgattaacagcgcattagagctgcttaatgaggtcggaatcgaaggtttaacaacccgtaaactcgcccagaagctaggtgtagagcagcctacattgtattggcatgtaaaaaataagcgagctctgctcgacgccttagccattgagatgatggataggcacgcaactcacttttgccctttagaaggggaaagctggcaagattttttacgtaataatgctaaaagtatgagatgtgctttactaagccatcgcgatggagcaaaagtatgnttaggtacacgctggacagaacaactgtatgaaactgctgaaaatntgttagcctttttatgccaacaaggtttttcactagagaatgcattatatgcaatgagtgctgtgaggnwctttactttaggttgcgtattgtttgatcaagagntccaagtcgctaaagaagaaagggaaacacctactactgctagtatgccgccattattgcgacaagtttnggaattaaaggatcaccaaggtgcagagccagccttcttattcggccttgaattgatcatatgcggattagaaaaacaacttaaatgcgaaagtgggtcttaa

SEQ ID NO: 540 - DNA, 627 bp, Artificial Sequence
  Sulfonylurea responsive repressor
atgggatctagattagataaaagtaaagtgattaacagcgcattagagctgcttaatgaggtcggaatcgaaggtttaacaacccgtaaactcgcccagaagctaggtgtagagcagcctacattgtattggcatgtaaaaaataagcgagctctgctcgacgccttagccattgagatgatggataggcacgcaactcacgtgtgccctttagaaggggaaagctggcaagattttttacgtaatactgctaaaagtatgagatgtgctttactaagccatcgcgatggagcaaaagtatgtttaggtacacgctggacagaacaacattatgaaactgctgaaaatatgttagcctttttatgccaacaaggtttttcactagagaatgcattatatgcaatgagtgctgtgagggtgtttactttaggttgcgtattgtttgatcaagagagccaagtcgctaaagaagaaagggaaacacctactactgctagtatgccgccattattgcgacaagtttgggaattaaaggatcaccaaggtgcagagccagccttcttattcggccttgaattgatcatatgcggattagaaaaacaacttaaatgcgaaagtgggtcttaa

SEQ ID NO: 541 - DNA, 627 bp, Artificial Sequence
  Sulfonylurea responsive repressor
  misc_feature 203, 512: n = A,T,C or G
atgggatctagattagataaaagtaaagtgattaacagcgcattagagctgcttaatgaggtcggaatcgaaggtttaacaacccgtaaactcgcccagaagctaggtgtagagcagcctacattgtattggcatgtaaaaaataagcgagctctgctcgacgccttagccattgagatgatggataggcacccaactcactnktgccctttagaaggggaaagctggcaagattttttacgtaatactgctaaaagtatgagatgtgctttactaagccatcgcgatggagcaaaagtatgtttaggtacacgctggacagaacaattgtatgaaactgctgaaaatatgttagcctttttatgccaacaaggtttttcactagagaatgcattatatgcaatgagtgctgtgaggaastttactttaggttgcgtattgtttgatcaagagatccaagtcgctaaagaagaaagggaaacacctactactgctagtatgcccccattagnccgacaagcttgggaattaaaggatcaccaaggtgcagagccagccttcttattcggccttgaattgatcatatgcggattagaaaaacaacttaaatgcgaaagtgggtcttaa

SEQ ID NO: 542 - DNA, 627 bp, Artificial Sequence
  Sulfonylurea responsive repressor
  misc_feature 454, 511, 521: n = A,T,C or G
atgggatctagattagataaaagtaaagtgattaacagcgcattagagctgcttaatgaggtcggaatcgaaggtttaacaacccgtaaactcgcccagaagctaggtgtagagcagcctacattgtattggcatgtaaaaaataagcgagctctgctcgacgccttagccattgagatgatggataggcacgcaactcactattgccctttagaaggggaaagctggcaagattttttacgtaatactgctaaaagtatgagatgtgctttactaagccatcgcgatggagcaaaagtatgtttaggtacacgctggacagaaaaactgtatgaaactgctgaaaatatgttagcctttttatgccaacaaggtttttcactagagaatgcattatatgcasysagtgctgtgagggtgtttactttaggttgcgtattgtttgatcaagagntccaagtcgctaaagaagaaagggaaacacctactactgctagtatgccgccattancccgacaagnttgggaattaaaggatcaccaaggtgcagagccagccttcttattcggccttgaattgatcatatgcggattagaaaaacaacttaaatgcgaaagtgggtcttaa

SEQ ID NO: 543 - DNA, 627 bp, Artificial Sequence
  Sulfonylurea responsive repressor
atgggatctagattagataaaagtaaagtgattaacagcgcattagagctgcttaatgaggtcggaatcgaaggtttaacaacccgtaaactcgcccagaagctaggtgtagagcagcctacattgtattggcatgtaaaaaataagcgagctctgctcgacgccttagccattgagatgatggataggcacgcaactcacttgtgccctttagaaggggaaagctggcaagattttttacgtaatactgctaaaagtatgagatgtgctttactaagccatcgcgatggagcaaaagtatgtttaggtacacgctggacagaacaattgtatgaaactgctgaaaatatgttagcctttttatgccaacaaggtttttcactagagaatgcattatatgcagtgagtgctgtgagggtgtttactttaggttgcgtattgtttgatcaagasctccaagtcgctaaagaagaaagggaaacacctactwctgctagtatgycgccattagtgcgacaaggttgggaattaaaggatcaccaaggtgcagagccagccttcttattcggccttgaattgatcatatgcggattagaaaaacaacttaaatgcgaaagtgggtcttaa

SEQ ID NO: 544 - DNA, 627 bp, Artificial Sequence
  Sulfonylurea responsive repressor
  misc_feature 454: n = A,T,C or G
atgggatctagattagataaaagtaaagtgattaacagcgcattagagctgcttaatgaggtcggaatcgaaggtttaacaacccgtaaactcgcccagaagctaggtgtagagcagcctacattgtattggcatgtaaaaaataagcgagctctgctcgacgccttagccattgagatgatggataggcaccaaactcactattgccctttagaaggggaaagctggcaagattttttacgtaataatgctaaaagtatgagatgtgctttactaagccatcgcgatggagcaaaagtatggttaggtacacgctggacagaacaactgtatgaagctgctgaaaatctgttagcctttttatgccaacaaggtttttcactagagaatgcattatatgcagtgagtgctgtgaggawctttactttaggttgcgtattgtttgatcaagagntccaagtcgctaaagaagaaagggaaacacctactactgctagtatgccgccattattgcgacaagcttgggaattaaaggatcaccaaggtgcagagccagccttcttattcggccttgaattgatcatatgcggattagaaaaacaacttaaatgcgaaagtgggtcttaa

SEQ ID NO: 545 - DNA, 627 bp, Artificial Sequence
  Sulfonylurea responsive repressor
atgggatctagattagataaaagtaaagtgattaacagcgcattagagctgcttaatgaggtcggaatcgaaggtttaacaacccgtaaactcgcccagaagctaggtgtagagcagcctacattgtattggcatgtaaaaaataagcgagctctgctcgacgccttagccattgagatgatggataggcaccaaactcactattgccctttagaaggggaaagctggcaagattttttacgtaataatgctaaaagtatgagatgtgctttactaagcaatcgcgatggagcaaaagtatgtttaggtacacgctggacagaaaaattgtatgaagctgctgaaaatcaattagcctttttatgccaacaaggtttttcactagagaatgcattatatgcagtgagtgctgtgagggtgtttactttaggttgcgtattgtttgatcaagagctccaagtcgctaaagaagaaagggaaacacctactactgctagtatkccgccattagtgcgacaagcttgggaattaaaggatcaccaaggtgcagagccagccttcttattcggccttgaattgatcatatgcggattagaaaaacaacttaaatgcgaaagtgggtcttaa

SEQ ID NO: 546 - DNA, 627 bp, Artificial Sequence
  Sulfonylurea responsive repressor
atgggatctagattagataaaagtaaagtgattaacagcgcattagagctgcttaatgaggtcggaatcgaaggtttaacaacccgtaaactcgcccagaagctaggtgtagagcagcctacattgtattggcatgtaaaaaataagcgagctctgctcgacgccttagccattgagatgatggataggcacgcaactcactattgccctttagaaggggaaagctggcaagattttttacgtaatactgctaaaagtatgagatgtgctttactaagccatcgcgatggagcaaaagtatgtttaggtacacgctggacagaacaattgtatgaaactgctgaaaatcaattagcctttttatgccaacaaggtttttcactagagaatgcattatatgcagtgagtgctgtgagggtgtttactttaggttgcgtattgtttgatcaagagctccaagtcgctaaagaagaaagggaaacacctactactgctagtatgccgccattattgcgacaagcttgggaattaaaggatcaccaaggtgcagagccagccttcttattcggccttgaattgatcatatgcggattagaaaaacaacttaaatgcgaaagtgggtcttaa

SEQ ID NO: 547 - DNA, 627 bp, Artificial Sequence
  Sulfonylurea responsive repressor
atgggatctagattagataaaagtaaagtgattaacagcgcattagagctgcttaatgaggtcggaatcgaaggtttaacaacccgtaaactcgcccagaagctaggtgtagagcagcctacattgtattggcatgtaaaaaataagcgagctctgctcgacgccttagccattgagatgatggataggcaccaaactcactattgccctttagaaggggaaagctggcaagattttttacgtaataatgctaaaagtatgagatgtgctttactaagccatcgcgatggagcaaaagtatgtttaggtacacgctggacagaaaaacattatgaaggtgctgaaaatcaattagcctttttatgccaacaaggtttttcactagagaatgcattatatgcaatgagtgctgtgagggtgtttactttaggttgcgtattgtttgatcaagagagccaagtcgctaaagaagaaagggaaacacctactactgctagtatgccgccattagtgcgacaagtttgggaattaaaggatcaccaaggtgcagagccagccttcttattcggccttgaattgatcatatgcggattagaaaaacaacttaaatgcgaaagtgggtcttaa

SEQ ID NO: 548 - DNA, 627 bp, Artificial Sequence
  Sulfonylurea responsive repressor
atgggatctagattagataaaagtaaagtgattaacagcgcattagagctgcttaatgaggtcggaatcgaaggtttaacaacccgtaaactcgcccagaagctaggtgtagagcagcctacattgtattggcatgtaaaaaataagcgagctctgctcgacgccttagccattgagatgatggataggcaccaaactcacatgtgccctttagaaggggaaagctggcaagattttttacgtaataatgctaaaagtatgagatgtgctttactaagccatcgcgatggagcaaaagtatgtttaggtacacgctggacagaaaaacattatgaaactgctgaaaatcaattagcctttttatgccaacaaggtttttcactagagaatgcattatatgcagtgagtgctgtgagggtgtttactttaggttgcgtattgtttgatcaagagctccaagtcgctaaagaagaaagggaaacacctactactgctagtatgccgccattagtgcgacaagcttgggaattaaaggatcaccaaggtgcagagccagccttcttattcggccttgaattgatcatatgcggattagaaaaacaacttaaatgcgaaagtgggtcttaa

SEQ ID NO: 549 - DNA, 627 bp, Artificial Sequence
  Sulfonylurea responsive repressor
atgggatctagattagataaaagtaaagtgattaacagcgcattagagctgcttaatgaggtcggaatcgaaggtttaacaacccgtaaactcgcccagaagctaggtgtagagcagcctacattgtattggcatgtaaaaaataagcgagctctgctcgacgccttagccattgagatgatggataggcacgcaactcacttgtgccctttagaaggggaaagctggcaagattttttacgtaataatgctaaaagtatgagatgtgctttactaagccatcgcgatggagcaaaagtatgtttaggtacacgctggacagaacaacaatatgaaactgctgaaaatatgttagcctttttatgccaacaaggtttttcactagagaatgcattatatgcagtgagtgctgtgaggaactttactttaggttgcgtattgtttgatcaagagagccaagtcgctaaagaagaaagggaaacacctactactgctagtatgccgccattattgcgacaagcttgggaattaaaggatcaccaaggtgcagagccagccttcttattgggccttgaattgatcatatgcggattagaaaaacaacttaaatgcgaaagtgggtcttaa

SEQ ID NO: 550 - DNA, 627 bp, Artificial Sequence
  Sulfonylurea responsive repressor
atgggatctagattagataaaagtaaagtgattaacagcgcattagagctgcttaatgaggtcggaatcgaaggtttaacaacccgtaaactcgcccagaagctaggtgtagagcagcctacattgtattggcatgtaaaaaataagcgagctctgctcgacgccttagccattgagatgatggataggcacccaactcactattgccctttagaaggggaaagctggcaagattttttacgtaataatgctaaaagtatgagatgtgctttactaagccatcgcgatggagcaaaagtatgtttaggtacacgctggacagaacaacaatatgaaactgctgaaaatcaattagcctttttatgccaacaaggtttttcactagagaatgcattatatgcaatgagtgctgtgaggaactttactttaggttgcgtattgtttgatcaagagakccaagtcgctaaagaagaaagggaaacacctactactgctagtatgccgccattattgcgacaagcttgggaattaaaggatcaccaaggtgcagagccagccttcttattcggccttgaattgatcatatgcggattagaaaaacaacttaaatgcgaaagtgggtcttaa

SEQ ID NO: 551 - DNA, 627 bp, Artificial Sequence
  Sulfonylurea responsive repressor
atgggatctagattagataaaagtaaagtgattaacagcgcattagagctgcttaatgaggtcggaatcgaaggtttaacaacccgtaaactcgcccagaagctaggtgtagagcagcctacattgtattggcatgtaaaaaataagcgagctctgctcgacgccttagccattgagatgatggataggcaccaaactcacttttgccctttagaaggggaaagctggcaagattttttacgtaatactgctaaaagtatgagatgtgctttactaagccatcgcgatggagcaaaagtatgtttaggtacacgctggacagaacaacaatatgaaactgctgaaaatatgttagcctttttatgccaacaaggtttttcactagagaatgcattatatgcagtgagtgctgtgagggtgtttactttaggttgcgtattgtttgatcaagagagccaagtcgctaaagaagaaagggaaacacctactactgctagtatgccgccattagcccgacaagcttgggaattaaaggatcaccaaggtgcagagccagccttcttattcggccttgaattgatcatatgcggattagaaaaacaacttaaatgcgaaagtgggtcttaa

SEQ ID NO: 552 - DNA, 627 bp, Artificial Sequence
  Sulfonylurea responsive repressor
atgggatctagattagataaaagtaaagtgattaacagcgcattagagctgcttaatgaggtcggaatcgaaggtttaacaacccgtaaactcgcccagaagctaggtgtagagcagcctacattgtattggcatgtaaaaaataagcgagctctgctcgacgccttagccattgagatgatggataggcaccaaactcacgtgtgccctttagaaggggaaagctggcaagattttttacgtaataatgctaaaagtatgagatgtgctttactaagccatcgcgatggagcaaaagtatgtttaggtacacgctggacagaacaaatgtatgaaactgctgaaaatcaattagcctttttatgccaacaaggtttttcactagagaatgcattatatgcagtgagtgctgtgagggtgtttactttaggttgcgtattgtttgatcaagagagccaagtcgctaaagaagaaagggaaacacctactactgctagtatgccgccattattgcgacaagcttgggaattaaaggatcaccaaggtgcagagccagccttcttattcggccttgaattgatcatatgcggattagaaaaacaacttaaatgcgaaagtgggtcttaa

SEQ ID NO: 553 - DNA, 627 bp, Artificial Sequence
  Sulfonylurea responsive repressor
atgggatctagattagataaaagtaaagtgattaacagcgcattagagctgcttaatgaggtcggaatcgaaggtttaacaacccgtaaactcgcccagaagctaggtgtagagcagcctacattgtattggcatgtaaaaaataagcgagctctgctcgacgccttagccattgagatgatggataggcacgcaactcactattgccctttagaaggggaaagctggcaagattttttacgtaatactgctaaaagtatgagatgtgctttactaagccatcgcgatggagcaaaagtatgtttaggtacacgctggacagaacaattgtatgaaactgctgaaaatcaattagcctttttatgccaacaaggtttttcactagagaatgcattatatgcaatgagtgctgtgagggtgtttactttaggttgcgtattgtttgatcaagagagccaagtcgctaaagaagaaagggaaacacctactactgctagtatgccgccattattgcgacaagcttgggaattaaaggatcaccaaggtgcagagccagccttcttattcggccttgaattgatcatatgcggattagaaaaacaacttaaatgcgaaagtgggtcttaa

SEQ ID NO: 554 - DNA, 627 bp, Artificial Sequence
  Sulfonylurea responsive repressor
atgggatctagattagataaaagtaaagtgattaacagcgcattagagctgcttaatgaggtcggaatcgaaggtttaacaacccgtaaactcgcccagaagctaggtgtagagcagcctacattgtattggcatgtaaaaaataagcgagctctgctcgacgccttagccattgagatgatggataggcacgcaactcactattgccctttagaaggggaaagctggcaagattttttacgtaataatgctaaaagtatgagatgtgctttactaagccatcgcgatggagcaaaagtatgtttaggtacacgctggacagaacaattgtatgaaactgctgaaaatatgttagcctttttatgccaacaaggtttttcactagagaatgcattatatgcaatgagtgctgtgagggtgtttactttaggttgcgtattgtttgatcaagagagccaagtcgctaaagaagaaagggaaacacctactactgctagtatgccgccattagtgcgacaaggttgggaattaaaggatcaccaaggtgcagagccagccttcttattcggccttgaattgatcatatgcggattagaaaaacaacttaaatgcgaaagtgggtcttaa

SEQ ID NO: 555 - DNA, 627 bp, Artificial Sequence
  Sulfonylurea responsive repressor
atgggatctagattagataaaagtaaagtgattaacagcgcattagagctgcttaatgaggtcggaatcgaaggtttaacaacccgtaaactcgcccagaagctaggtgtagagcagcctacattgtattggcatgtaaaaaataagcgagctctgctcgacgccttagccattgagatgatggataggcaccaaactcactattgccctttagaaggggaaagctggcaagattttttacgtaataatgctaaaagtatgagatgtgctttactaagccatcgcgatggagcaaaagtatggttaggtacacgctggacagaaaaacaatatgaaagtgctgaaaatatgttagcctttttatgccaacaaggtttttcactagagaatgcattatatgcagtgagtgctgtgagggtgtttactttaggttgcgtattgtttgatcaagagctccaagtcgctaaagaagaaagggaaacacctactactgctagtatgccgccattagtgcgacaagcttgggaattaaaggatcaccaaggtgcagagccagccttcttattcggccttgaattgatcatatgcggattagaaaaacaacttaaatgcgaaagtgggtcttaa

SEQ ID NO: 556 - DNA, 627 bp, Artificial Sequence
  Sulfonylurea responsive repressor
atgggatctagattagataaaagtaaagtgattaacagcgcattagagctgcttaatgaggtcggaatcgaaggtttaacaacccgtaaactcgcccagaagctaggtgtagagcagcctacattgtattggcatgtaaaaaataagcgagctctgctcgacgccttagccattgagatgatggataggcaccaaactcacatgtgccctttagaaggggaaagctggcaagattttttacgtaatactgctaaaagtatgagatgtgctttactaagccatcgcgatggagcaaaagtatgtttaggtacacgctggacagaacaaatgtatgaagctgctgaaaatcaattagcctttttatgccaacaaggtttttcactagagaatgcattatatgcaatgagtgctgtgagggtgtttactttaggttgcgtattgtttgatcaagagagccaagtcgctaaagaagaaagggaaacacctactactgctagtatgccgccattagtgcgacaagtttgggaattaaaggatcaccaaggtgcagagccagccttcttattcggccttgaattgatcatatgcggattagaaaaacaacttaaatgcgaaagtgggtcttaa

SEQ ID NO: 557 - DNA, 627 bp, Artificial Sequence
  Sulfonylurea responsive repressor
atgggatctagattagataaaagtaaagtgattaacagcgcattagagctgcttaatgaggtcggaatcgaaggtttaacaacccgtaaactcgcccagaagctaggtgtagagcagcctacattgtattggcatgtaaaaaataagcgagctctgctcgacgccttagccattgagatgatggataggcaccaaactcactattgccctttagaaggggaaagctggcaagattttttacgtaatactgctaaaagtatgagatgtgctttactaagccatcgcgatggagcaaaagtatgtttaggtacacgctggacagaacaaatgtatgaaactgctgaaaatcaattagcctttttatgccaacaaggtttttcactagagaatgcattatatgcaatgagtgctgtgagggtgtttactttaggttgcgtattgtttgatcaagagagccaagtcgctaaagaagaaagggaaacacctactactgctagtatgccgccattattgcgacaagtttgggaattaaaggatcaccaaggtgcagagccagccttcttattcggccttgaattgatcatatgcggattagaaaaacaacttaaatgcgaaagtgggtcttaa

SEQ ID NO: 558 - DNA, 627 bp, Artificial Sequence
  Sulfonylurea responsive repressor
  misc_feature 325, 338, 513: n = A,T,C or G
atgggatctagattagataaaagtaaagtgattaacagcgcattagagctgcttaatgaggtcggaatcgaaggtttaacaacccgtaaactcgcccagaagctaggtgtagagcagcctacattgtattggcatgtaaaaaataagcgagctctgctcgacgccttagccattgagatgatggataggcaccaaactcacatttgccctttagaaggggaaagctggcaagattttttacgtaatactgctaaaagtatgagatgtgctttactaagccatcgcgatggagcaaaagtatgtttaggtacacgctggacagaanaacartatgaaantgctgaaaatatgttagcctttttatgccaacaaggtttttcactagagaatgcattatatgcaatgagtgctgtgagggtgtttactttaggttgcgtattgtttgatcaagagctccaagtcgctaaagaagaaagggaaacacctactactgctagtatgccgccattagtncgacaagtttgggaattaaaggatcaccaaggtgcagagccagccttcttattcggccttgaattgatcatatgcggattagaaaaacaacttaaatgcgaaagtgggtcttaa

SEQ ID NO: 559 - DNA, 627 bp, Artificial Sequence
  Sulfonylurea responsive repressor
atgggatctagattagataaaagtaaagtgattaacagcgcattagagctgcttaatgaggtcggaatcgaaggtttaacaacccgtaaactcgcccagaagctaggtgtagagcagcctacattgtattggcatgtaaaaaataagcgagctctgctcgacgccttagccattgagatgatggataggcaccaaactcacatgtgccctttagaaggggaaagctggcaagattttttacgtaataatgctaaaagtatgagatgtgctttactaagccatcgcgatggagcaaaagtatgtttaggtacacgctggacagaacaacattatgaagctgctgaaaatcaattagcctttttatgccaacaaggtttttcactagagaatgcattatatgcaatgagtgctgtgagggtgtttactttaggttgcgtattgtttgatcaagagagccaagtcgctaaagaagaaagggaaacacctactactgctagtatgccgccattagtgcgacaagcttgggaattaaaggatcaccaaggtgcagagccagccttcttattcggccttgaattgatcatatgcggattagaaaaacaacttaaatgcgaaagtgggtcttaa

SEQ ID NO: 560 - DNA, 627 bp, Artificial Sequence
  Sulfonylurea responsive repressor
  misc_feature 403, 420, 513: n = A,T,C or G
atgggatctagattagataaaagtaaagtgattaacagcgcattagagctgcttaatgaggtcggaatcgaaggtttaacaacccgtaaactcgcccagaagctaggtgtagagcagcctacattgtattggcatgtaaaaaataagcgagctctgctcgacgccttagccattgagatgatggataggcacgcaactcactattgccctttagaaggggaaagctggcaagattttttacgtaatactgctaaaagtatgagatgtgctttactaagccatcgcgatggagcaaaagtatgtttaggtacacgctggacagaacaacattatgaaactgctgaaaatcaattagcctttttatgccaacaaggtttttcactagagaatgcattatatgcantgagtgctgtgagggtntttactttaggttgcgtattgtttgatcaagagctccaagtcgctaaagaagaaagggaaacacctactactgctagtatgccgccattattncgacaagtttgggaattaaaggatcaccaaggtgcagagccagccttcttattcggccttgaattgatcatatgcggattagaaaaacaacttaaatgcgaaagtgggtcttaa

SEQ ID NO: 561 - DNA, 627 bp, Artificial Sequence
  Sulfonylurea responsive repressor
  misc_feature 203, 338, 415: n = A,T,C or G
atgggatctagattagataaaagtaaagtgattaacagcgcattagagctgcttaatgaggtcggaatcgaaggtttaacaacccgtaaactcgcccagaagctaggtgtagagcagcctacattgtattggcatgtaaaaaataagcgagctctgctcgacgccttagccattgagatgatggataggcaccaaactcactnttgccctttagaaggggaaagctggcaagattttttacgtaatactgctaaaagtatgagatgtgctttactaagccatcgcgatggagcaaaagtatgtttaggtacacgctggacagaacaactgtatgaagntgctgaaaatcaattagcctttttatgccaacaaggtttttcactagagaatgcattatatgcaatgagtgctgtgngggtgtttactttaggttgcgtattgtttgatcaagagctccaagtcgctaaagaagaaagggaaacacctactactgctagtatgccgccattatcccgacaagtttgggaattaaaggatcaccaaggtgcagagccagccttcttattcggccttgaattgatcatatgcggattagaaaaacaacttaaatgcgaaagtgggtcttaa

SEQ ID NO: 562 - DNA, 627 bp, Artificial Sequence
  Sulfonylurea responsive repressor
atgggatctagattagataaaagtaaagtgattaacagcgcattagagctgcttaatgaggtcggaatcgaaggtttaacaacccgtaaactcgcccagaagctaggtgtagagcagcctacattgtattggcatgtaaaaaataagcgagctctgctcgacgccttagccattgagatgatggataggcacgcaactcacatttgccctttagaaggggaaagctggcaagattttttacgtaataatgctaaaagtatgagatgtgctttactaagccatcgcgatggagcaaaagtatgtttaggtacacgctggacagaacaacaatatgaagctgctgaaaatatgttagcctttttatgccaacaaggtttttcactagagaatgcattatatgcaatgagtgctgtgagggtgtttactttaggttgcgtattgtttgatcaagagctccaagtcgctaaagaagaaagggaaacacctactactgctagtatgccgccattattgcgacaagtttgggaattaaaggatcaccaaggtgcagagccagccttcttattcggccttgaattgatcatatgcggattagaaaaacaacttaaatgcgaaagtgggtcttaa

SEQ ID NO: 563 - DNA, 627 bp, Artificial Sequence
  Sulfonylurea responsive repressor
atgggatctagattagataaaagtaaagtgattaacagcgcattagagctgcttaatgaggtcggaatcgaaggtttaacaacccgtaaactcgcccagaagctaggtgtagagcagcctacattgtattggcatgtaaaaaataagcgagctctgctcgacgccttagccattgagatgatggataggcaccaaactcacatttgccctttagaaggggaaagctggcaagattttttacgtaataatgctaaaagtatgagatgtgctttactaagccatcgcgatggagcaaaagtatgtttaggtacacgctggacagaacaacaatatgaaactgctgaaaatcaattagcctttttatgccaacaaggtttttcactagagaatgcattatatgcaatgagtgctgtgagggtgtttactttaggttgcgtattgtttgatcaagagagccaagtcgctaaagaagaaagggaaacacctactactgctagtatgccgccattagtgcgacaaggttgggaattaaaggatcaccaaggtgcagagccagccttcttattcggccttgaattgatcatatgcggattagaaaaacaacttaaatgcgaaagtgggtcttaa

SEQ ID NO: 564 - DNA, 627 bp, Artificial Sequence
  Sulfonylurea responsive repressor
atgggatctagattagataaaagtaaagtgattaacagcgcattagagctgcttaatgaggtcggaatcgaaggtttaacaacccgtaaactcgcccagaagctaggtgtagagcagcctacattgtattggcatgtaaaaaataagcgagctctgctcgacgccttagccattgagatgatggataggcaccaaactcacgtgtgccctttagaaggggaaagctggcaagattttttacgtaataatgctaaaagtatgagatgtgctttactaagccatcgcgatggagcaaaagtatgtttaggtacacgctggacagaacaacaatatgaaagtgctgaaaatatgttagcctttttatgccaacaaggtttttcactagagaatgcattatatgcaatgagtgctgtgagggtgtttactttaggttgcgtattgtttgatcaagagagccaagtcgctaaagaagaaagggaaacacctactactgctagtatgccgccattattgcgacaagttttggaattaaaggatcaccaaggtgcagagccagccttcttattcggccttgaattgatcatatgcggattagaaaaacaacttaaatgcgaaagtgggtcttaa

SEQ ID NO: 565 - DNA, 627 bp, Artificial Sequence
  Sulfonylurea responsive repressor
atgggatctagattagataaaagtaaagtgattaacagcgcattagagctgcttaatgaggtcggaatcgaaggtttaacaacccgtaaactcgcccagaagctaggtgtagagcagcctacattgtattggcatgtaaaaaataagcgagctctgctcgacgccttagccattgagatgatggataggcacgcaactaactattgccctttagaaggggaaagctggcaagattttttacgtaatactgctaaaagtatgagatgtgctttactaagccatcgcgatggagcaaaagtatgtttaggtacwcgctggacagaacaacaatatgaaactgctgaaaatatgttagcctttttatgccaacaaggtttttcactagagaatgcattatatgcagtgagtgctgtgagggtgtttactttaggttgcgtattgtttgatcaagagctccaagtcgctaaagaagaaagggaaacacctactactgctagtatgccgccattattgcgacaagtttgggaattaaaggatcaccaaggtgcagagccagccttcttattcggccttgaattgatcatatgcggattagaaaaacaacttaaatgcgaaagtgggtcttaa

SEQ ID NO: 566 - DNA, 627 bp, Artificial Sequence
  Sulfonylurea responsive repressor
atgggatctagattagataaaagtaaagtgattaacagcgcattagagctgcttaatgaggtcggaatcgaaggtttaacaacccgtaaactcgcccagaagctaggtgtagagcagcctacattgtattggcatgtaaaaaataagcgagctctgctcgacgccttagccattgagatgatggataggcaccaaactcacttttgccctttagaaggggaaagctggcaagattttttacgtaatactgctaaaagtatgagatgtgctttactaagccatcgcgatggagcaaaagtatggttaggtacacgctggacagaaaaacaatatgaaactgctgaaaatcaattagcctttttatgccaacaaggtttttcactagagaatgcattatatgcagtgagtgctgtgagggtgtttactttaggttgcgtattgtttgatcaagagctccaagtcgctaaagaagaaagggaaacacctactactgctagtatgccgccattattgcgacaagcttgggaattaaaggatcaccaaggtgcagagccagccttcttattcggccttgaattgatcatatgcggattagaaaaacaacttaaatgcgaaagtgggtcttaa

SEQ ID NO: 567 - DNA, 627 bp, Artificial Sequence
  Sulfonylurea responsive repressor
  misc_feature 325, 328, 329, 330, 337, 415, 418, 419, 420, 513, 521: n = A,T,C or G
atgggatctagattagataaaagtaaagtgattaacagcgcattagagctgcttaatgaggtcggaatcgaaggtttaacaacccgtaaactcgcccagaagctaggtgtagagcagcctacattgtattggcatgtaaaaaataagcgagctctgctcgacgccttagccattgagatgatggataggcaccaaactcactattgccctttagaaggggaaagctggcaagattttttacgtaatactgctaaaagtatgagatgtgctttactaagccatcgcgatggagcaaaagtatgtttaggtacacgctggacagaanaannntatgaanctgctgaaaatcaattagcctttttatgccaacaaggtttttcactagagaatgcattatatgcaatgagtgctgtgnggnnntttactttaggttgcgtattgtttgatcaagagagccaagtcgctaaagaagaaagggaaacacctactactgctagtatgccgccattattncgacaagnttgggaattaaaggatcaccaaggtgcagagccagccttcttattcggccttgaattgatcatatgcggattagaaaaacaacttaaatgcgaaagtgggtcttaa

SEQ ID NO: 568 - DNA, 627 bp, Artificial Sequence
  Sulfonylurea responsive repressor
atgggatctagattagataaaagtaaagtgattaacagcgcattagagctgcttaatgaggtcggaatcgaaggtttaacaacccgtaaactcgcccagaagctaggtgtagagcagcctacattgtattggcatgtaaaaaataagcgagctctgctcgacgccttagccattgagatgatggataggcaccaaactcactattgccctttagaaggggaaagctggcaagattttttacgtaataatgctaaaagtatgagatgtgctttactaagccatcgcgatggagcaaaagtatgtttaggtacacgctggacagaacaattgtatgaaactgctgaaaatatgttagcctttttatgccaacaaggtttttcactagagaatgcattatatgcaatgagtgctgtgagggtgtttactttaggttgcgtattgtttgatcaagagagccaagtcgctaaagaagaaagggaaacacctactactgctagtatgccgccattattgcgacaagtttgggaattaaaggatcaccaaggtgcagagccagccttcttattcggccttgaattgatcatatgcggattagaaaaacaacttaaatgcgaaagtgggtcttaa

SEQ ID NO: 569 - DNA, 627 bp, Artificial Sequence
  Sulfonylurea responsive repressor
atgggatctagattagataaaagtaaagtgattaacagcgcattagagctgcttaatgaggtcggaatcgaaggtttaacaacccgtaaactcgcccagaagctaggtgtagagcagcctacattgtattggcatgtaaaaaataagcgagctctgctcgacgccttagccattgagatgatggataggcacgcaactcacttgtgccctttagaaggggaaagctggcaagattttttacgtaatactgctaaaagtatgagatgtgctttactaagccatcgcgatggagcaaaagtatgtttaggtacacgctggacagaacaacaatatgaagctgctgaaaatatgttagcctttttatgccaacaaggtttttcactagagaatgcattatatgcaatgagtgctgtgagggtgtttactttaggttgcgtattgtttgatcaagagagccaagtcgctaaagaagaaagggaaacacctactactgctagtatgccgccattattgcgacaagtttgggaattaaaggatcaccaaggtgcagagccagccttcttattcggccttgaattgatcatatgcggattagaaaaacaacttaaatgcgaaagtgggtcttaa

SEQ ID NO: 570 - DNA, 627 bp, Artificial Sequence
  Sulfonylurea responsive repressor
atgggatctagattagataaaagtaaagtgattaacagcgcattagagctgcttaatgaggtcggaatcgaaggtttaacaacccgtaaactcgcccagaagctaggtgtagagcagcctacattgtattggcatgtaaaaaataagcgagctctgctcgacgccttagccattgagatgatggataggcaccaaactcactattgccctttagaaggggaaagctggcaagattttttacgtaataatgctaaaagtatgagatgtgctttactaagccatcgcgatggagcaaaagtatgtttaggtacacgctggacagaaaaacattatgaaagtgctgaaaatatgttagcctttttatgccaacaaggtttttcactagagaatgcattatatgcaatgagtgctgtgagggtgtttactttaggttgcgtattgtttgatcaagagctccaagtcgctaaagaagaaagggaaacacctactactgctagtatgccgccattattgcgacaagtttgggaattaaaggatcaccaaggtgcagagccagccttcttattcggccttgaattgatcatatgcggattagaaaaacaacttaaatgcgaaagtgggtcttaa

SEQ ID NO: 571 - DNA, 627 bp, Artificial Sequence
  Sulfonylurea responsive repressor
atgggatctagattagataaaagtaaagtgattaacagcgcattagagctgcttaatgaggtcggaatcgaaggtttaacaacccgtaaactcgcccagaagctaggtgtagagcagcctacattgtattggcatgtaaaaaataagcgagctctgctcgacgccttagccattgagatgatggataggcaccaaactcactattgccctttagaaggggaaagctggcaagattttttacgtaataatgctaaaagtatgagatgtgctttactaagccatcgcgatggagcaaaagtatgtttaggtacacgctggacagaacaacattatgaaactgctgaaaatcaattagcctttttatgccaacaaggtttttcactagagaatgcattatatgcaatgagtgctgtgagggtgtttactttaggttgcgtattgtttgatcaagagagccaagtcgctaaagaagaaagggaaacacctactactgctagtatgccgccattagtgcgacaaggttgggaattaaaggatcaccaaggtgcagagccagccttcttattcggccttgaattgatcatatgcggattagaaaaacaacttaaatgcgaaagtgggtcttaa

SEQ ID NO: 572 - DNA, 627 bp, Artificial Sequence
  Sulfonylurea responsive repressor
atgggatctagattagataaaagtaaagtgattaacagcgcattagagctgcttaatgaggtcggaatcgaaggtttaacaacccgtaaactcgcccagaagctaggtgtagagcagcctacattgtattggcatgtaaaaaataagcgagctctgctcgacgccttagccattgagatgatggataggcacgcaactcactattgccctttagaaggggaaagctggcaagattttttacgtaataatgctaaaagtatgagatgtgctttactaagccatcgcgatggagcaaaagtatgtttaggtacacgctggacagaaaaacaatatgaagctgctgaaaatcaattagcctttttatgccaacaaggtttttcactagagaatgcattatatgcagtgagtgctgtgagggtgtttactttaggttgcgtattgtttgatcaagagagccaagtcgctaaagaagaaagggaaacacctactactgctagtatgccgccattattgcgacaaggttgggaattaaaggatcaccaaggtgcagagccagccttcttattcggccttgaattgatcatatgcggattagaaaaacaacttaaatgcgaaagtgggtcttaa

SEQ ID NO: 573 - DNA, 627 bp, Artificial Sequence
  Sulfonylurea responsive repressor
atgggatctagattagataaaagtaaagtgattaacagcgcattagagctgcttaatgaggtcggaatcgaaggtttaacaacccgtaaactcgcccagaagctaggtgtagagcagcctacattgtattggcatgtaaaaaataagcgagctctgctcgacgccttagccattgagatgatggataggcacgcaactcactattgccctttagaaggggaaagctggcaagattttttacgtaataatgctaaaagtatgagatgtgctttactaagccatcgcgatggagcaaaagtatgtttaggtacacgctggacagaacaattgtatgaagctgctgaaaatcaattagcctttttatgccaacaaggtttttcactagagaatgcattatatgcaatgagtgctgtgagggtgtttactttaggttgcgtattgtttgatcaagagagccaagtcgctaaagaagaaagggaaacacctactactgctagtatgccgccattagtgcgacaagtttgggaattaaaggatcaccaaggtgcagagccagccttcttattcggccttgaattgatcatatgcggattagaaaaacaacttaaatgcgaaagtgggtcttaa

SEQ ID NO: 574 - DNA, 627 bp, Artificial Sequence; identical to SEQ ID NO: 434
  Sulfonylurea responsive repressor

SEQ ID NO: 575 - DNA, 627 bp, Artificial Sequence
  Sulfonylurea responsive repressor
atgggatctagattagataaaagtaaagtgattaacagcgcattagagctgcttaatgaggtcggaatcgaaggtttaacaacccgtaaactcgcccagaagctaggtgtagagcagcctacattgtattggcatgtaaaaaataagcgagctctgctcgacgccttagccattgagatgatggataggcaccaaactcactattgccctttagaaggggaaagctggcaagattttttacgtaataatgctaaaagtatgagatgtgctttactaagccatcgcgatggagcaaaagtatgtttaggtacacgctggacagaaaaacattatgaaactgctgaaaatatgttagcctttttatgccaacaaggtttttcactagagaatgcattatatgcagtgagtgctgtgagggtgtttactttaggttgcgtattgtttgatcaagagctccaagtcgctaaagaagaaagggaaacacctactactgctagtatgccgccattattgcgacaagtttgggaattaaaggatcaccaaggtgcagagccagccttcttattcggccttgaattgatcatatgcggattagaaaaacaacttaaatgcgaaagtgggtcttaa

SEQ ID NO: 576 - DNA, 627 bp, Artificial Sequence
  Sulfonylurea responsive repressor
  misc_feature 193, 330, 337, 338, 403, 512: n = A,T,C or G
atgggatctagattagataaaagtaaagtgattaacagcgcattagagctgcttaatgaggtcggaatcgaaggtttaacaacccgtaaactcgcccagaagctaggtgtagagcagcctacattgtattggcatgtaaaaaataagcgagctctgctcgacgccttagccattgagatgatggataggcacncaactcactattgccctttagaaggggaaagctggcaagattttttacgtaatactgctaaaagtatgagatgtgctttactaagccatcgcgatggagcaaaagtatggttaggtacacgctggacagaacaacantatgaanntgctgaaaatctgttagcctttttatgccaacaaggtttttcactagagaatgcattatatgcantgagtgctgtgaggaactttactttaggttgcgtattgtttgatcaagagagccaagtcgctaaagaagaaagggaaacacctactactgctagtatgccgccattatnccgacaaggttgggaattaaaggatcaccaaggtgcagagccagccttcttattcggccttgaattgatcatatgcggattagaaaaacaacttaaatgcgaaagtgggtcttaa

SEQ ID NO: 577 - DNA, 627 bp, Artificial Sequence
  Sulfonylurea responsive repressor
atgggatctagattagataaaagtaaagtgattaacagcgcattagagctgcttaatgaggtcggaatcgaaggtttaacaacccgtaaactcgcccagaagctaggtgtagagcagcctacattgtattggcatgtaaaaaataagcgagctctgctcgacgccttagccattgagatgatggataggcaccaaactcacatttgccctttagaaggggaaagctggcaagattttttacgtaatactgctaaaagtatgagatgtgctttactaagccatcgcgatggagcaaaagtatgtttaggtacacgctggacagaaaaacattatgaagctgctgaaaatatgttagcctttttatgccaacaaggtttttcactagagaatgcattatatgcagtgagtgctgtgagggtgtttactttaggttgcgtattgtttgatcaagagagccaagtcgctaaagaagaaagggaaacacctactactgctagtatgccgccattagtgcgacaagtttgggaattaaaggatcaccaaggtgcagagccagccttcttattcggccttgaattgatcatatgcggattagaaaaacaacttaaatgcgaaagtgggtcttaa

SEQ ID NO: 578 - DNA, 627 bp, Artificial Sequence
  Sulfonylurea responsive repressor
atgggatctagattagataaaagtaaagtgattaacagcgcattagagctgcttaatgaggtcggaatcgaaggtttaacaacccgtaaactcgcccagaagctaggtgtagagcagcctacattgtattggcatgtaaaaaataagcgagctctgctcgacgccttagccattgagatgatggataggcaccaaactcactattgccctttagaaggggaaagctggcaagattttttacgtaataatgctaaaagtatgagatgtgctttactaagccatcgcgatggagcaaaagtatgtttaggtacacgctggacagaacaattgtatgaaagtgctgaaaatcaattagcctttttatgccaacaaggtttttcactagagaatgcattatatgcaatgagtgctgtgagggtgtttactttaggttgcgtattgtttgatcaagagctccaagtcgctaaagaagaaagggaaacacctactactgctagtatgccgccattattgcgacaaggttgggaattaaaggatcaccaaggtgcagagccagccttcttattcggccttgaattgatcatatgcggattagaaaaacaacttaaatgcgaaagtgggtcttaa

SEQ ID NO: 579 - DNA, 627 bp, Artificial Sequence
  Sulfonylurea responsive repressor
atgggatctagattagataaaagtaaagtgattaacagcgcattagagctgcttaatgaggtcggaatcgaaggtttaacaacccgtaaactcgcccagaagctaggtgtagagcagcctacattgtattggcatgtaaaaaataagcgagctctgctcgacgccttagccattgagatgatggataggcacgcaactcacatttgccctttagaaggggaaagctggcaagattttttacgtaataatgctaaaagtatgagatgtgctttactaagccatcgcgatggagcaaaagtatgtttaggtacacgctggacagaacaacaatatgaagctgctgaaaatcaattagcctttttatgccaacaaggtttttcactagagaatgcattatatgcagtgagtgctgtgagggtgtttactttaggttgcgtattgtttgatcaagagctccaagtcgctaaagaagaaagggaaacacctactactgctagtatgccgccattattgcgacaagcttgggaattaaaggatcaccaaggtgcagagccagccttcttattcggccttgaattgatcatatgcggattagaaaaacaacttaaatgcgaaagtgggtcttaa

SEQ ID NO: 580 - DNA, 627 bp, Artificial Sequence
  Sulfonylurea responsive repressor
atgggatctagattagataaaagtaaagtgattaacagcgcattagagctgcttaatgaggtcggaatcgaaggtttaacaacccgtaaactcgcccagaagctaggtgtagagcagcctacattgtattggcatgtaaaaaataagcgagctctgctcgacgccttagccattgagatgatggataggcacgcaactcactattgccctttagaaggggaaagctggcaagattttttacgtaataatgctaaaagtatgagatgtgctttactaagccatcgcgatggagcaaaagtatgtttaggtacacgctggacagaaaaacaatatgaaactgctgaaaatcaattagcctttttatgccaacaaggtttttcactagagaatgcattatatgcagtgagtgctgtgagggtgtttactttaggttgcgtattgtttgatcaagagctccaagtcgctaaagaagaaagggaaacacctactactgctagtatgccgccattattgcgacaagtttgggaattaaaggatcaccaaggtgcagagccagccttcttattcggccttgaattgatcatatgcggattagaaaaacaacttaaatgcgaaagtgggtcttaa

SEQ ID NO: 581 - DNA, 627 bp, Artificial Sequence
  Sulfonylurea responsive repressor
atgggatctagattagataaaagtaaagtgattaacagcgcattagagctgcttaatgaggtcggaatcgaaggtttaacaacccgtaaactcgcccagaagctaggtgtagagcagcctacattgtattggcatgtaaaaaataagcgagctctgctcgacgccttagccattgagatgatggataggcacgcaactcactattgccctttagaaggggaaagctggcaagattttttacgtaataatgctaaaagtatgagatgtgctttactaagccatcgcgatggagcaaaagtatgtttaggtacacgctggacagaaaaacattatgaaactgctgaaaatcaattagcctttttatgccaacaaggtttttcactagagaatgcattatatgcaatgagtgctgtgagggtgtttactttaggttgcgtattgtttgatcaagagagccaagtcgctaaagaagaaagggaaacacctactactgctagtatgccgccattattgcgacaagtttgggaattaaaggatcaccaaggtgcagagccagccttcttattcggccttgaattgatcatatgcggattagaaaaacaacttaaatgcgaaagtgggtcttaa

SEQ ID NO: 582 - DNA, 627 bp, Artificial Sequence
  Sulfonylurea responsive repressor
  misc_feature 328: n = A,T,C or G
atgggatctagattagataaaagtaaagtgattaacagcgcattagagctgcttaatgaggtcggaatcgaaggtttaacaacccgtaaactcgcccagaagctaggtgtagagcagcctacattgtattggcatgtaaaaaataagcgagctctgctcgacgccttagccattgagatgatggataggcaccaaactcactattgccctttagaaggggaaagctggcaagattttttacgtaataatgctaaaagtatgagatgtgctttactaagccatcgcgatggagcaaaagtatggttaggtacacgctggacagaacaantgtatgaagctgctgaaaatatgttagcctttttatgccaacaaggtttttcactagagaatgcattatatgcagtgagtgctgtgggggtgtttactttaggttgcgtattgtttgatcaagagctccaagtcgctaaagaagaaagggaaacacctactactgctagtatgccgccattagcccgacaagttttggaattaaaggatcaccaaggtgcagagccagccttcttattcggccttgaattgatcatatgcggattagaaaaacaacttaaatgcgaaagtgggtcttaa

SEQ ID NO: 583 - DNA, 627 bp, Artificial Sequence
  Sulfonylurea responsive repressor
atgggatctagattagataaaagtaaagtgattaacagcgcattagagctgcttaatgaggtcggaatcgaaggtttaacaacccgtaaactcgcccagaagctaggtgtagagcagcctacattgtattggcatgtaaaaaataagcgagctctgctcgacgccttagccattgagatgatggataggcacgcaactcactattgccctttagaaggggaaagctggcaagattttttacgtaataatgctaaaagtatgagatgtgctttactaagccatcgcgatggagcaaaagtatgtttaggtacacgctggacagaaaaattgtatgaagctgctgaaaatatgttagcctttttatgccaacaaggtttttcactagagaatgcattatatgcagtgagtgctgtgagggtgtttactttaggttgcgtattgtttgatcaagagagccaagtcgctaaagaagaaagggaaacacctactactgctagtatgccgccattattgcgacaagtttgggaattaaaggatcaccaaggtgcagagccagccttcttattcggccttgaattgatcatatgcggattagaaaaacaacttaaatgcgaaagtgggtcttaa

SEQ ID NO: 584 - DNA, 627 bp, Artificial Sequence
  Sulfonylurea responsive repressor
atgggatctagattagataaaagtaaagtgattaacagcgcattagagctgcttaatgaggtcggaatcgaaggtttaacaacccgtaaactcgcccagaagctaggtgtagagcagcctacattgtattggcatgtaaaaaataagcgagctctgctcgacgccttagccattgagatgatggataggcacgcaactcacatgtgccctttagaaggggaaagctggcaagattttttacgtaataatgctaaaagtatgagatgtgctttactaagccatcgcgatggagcaaaagtatggttaggtacacgctggacagaacaacaatatgaaactgctgaaaatatgttagcctttttatgccaacaaggtttttcactagagaatgcattatatgcagtgagtgctgtgagggtgtttactttaggttgcgtattgtttgatcaagagctccaagtcgctaaagaagaaagggaaacacctactactgctagtatgccgccattattgcgacaagtttgggaattaaaggatcaccaaggtgcagagccagccttcttattcggccttgaattgatcatatgcggattagaaaaacaacttaaatgcgaaagtgggtcttaa

SEQ ID NO: 585 - DNA, 627 bp, Artificial Sequence
  Sulfonylurea responsive repressor
atgggatctagattagataaaagtaaagtgattaacagcgcattagagctgcttaatgaggtcggaatcgaaggtttaacaacccgtaaactcgcccagaagctaggtgtagagcagcctacattgtattggcatgtaaaaaataagcgagctctgctcgacgccttagccattgagatgatggataggcaccaaactcactattgccctttagaaggggaaagctggcaagattttttacgtaataatgctaaaagtatgagatgtgctttactaagccatcgcgatggagcaaaagtatgtttaggtacacgctggacagaaaaacaatatgaaactgctgaaaatcaattagcctttttatgccaacaaggtttttcactagagaatgcattatatgcaatgagtgctgtgaggaactttactttaggttgcgtattgtttgatcaagagagccaagtcgctaaagaagaaagggaaacacctactactgctagtatgccgccattattgcgacaagcttgggaattaaaggatcaccaaggtgcagagccagccttcttattcggccttgaattgatcatatgcggattagaaaaacaacttaaatgcgaaagtgggtcttaa

SEQ ID NO: 586 - DNA, 627 bp, Artificial Sequence
  Sulfonylurea responsive repressor
atgggatctagattagataaaagtaaagtgattaacagcgcattagagctgcttaatgaggtcggaatcgaaggtttaacaacccgtaaactcgcccagaagctaggtgtagagcagcctacattgtattggcatgtaaaaaataagcgagctctgctcgacgccttagccattgagatgatggataggcaccaaactcactattgccctttagaaggggaaagctggcaagattttttacgtaataatgctaaaagtatgagatgtgctttactaagccatcgcgatggagcaaaagtatgtttaggtacacgctggacagaacaacaatatgaaactgctgaaaatcaattagcctttttatgccaacaaggtttttcactagagaatgcattatatgcagtgagtgctgtgagggtgtttactttaggttgcgtattgtttgatcaagagctccaagtcgctaaagaagaaagggaaacacctactactgctagtatgccgccattattgcgacaaggttgggaattaaaggatcaccaaggtgcagagccagccttcttattcggccttgaattgatcatatgcggattagaaaaacaacttaaatgcgaaagtgggtcttaa

SEQ ID NO: 587 - DNA, 627 bp, Artificial Sequence
  Sulfonylurea responsive repressor
atgggatctagattagataaaagtaaagtgattaacagcgcattagagctgcttaatgaggtcggaatcgaaggtttaacaacccgtaaactcgcccagaagctaggtgtagagcagcctacattgtattggcatgtaaaaaataagcgagctctgctcgacgccttagccattgagatgatggataggcaccaaactcacatttgccctttagaaggggaaagctggcaagattttttacgtaataatgctaaaagtatgagatgtgctttactaagccatcgcgatggagcaaaagtatgtttaggtacacgctggacagaaaaattgtatgaaactgctgaaaatcaattagcctttttatgccaacaaggtttttcactagagaatgcattatatgcaatgagtgctgtgagggtgtttactttaggttgcgtattgtttgatcaagagctccaagtcgctaaagaagaaagggaaacacctactactgctagtatgccgccattagtccgacaagtttgggaattaaaggatcaccaaggtgcagagccagccttcttattcggccttgaattgatcatatgcggattagaaaaacaacttaaatgcgaaagtgggtcttaa

SEQ ID NO: 588 - DNA, 627 bp, Artificial Sequence
  Sulfonylurea responsive repressor
atgggatctagattagataaaagtaaagtgattaacagcgcattagagctgcttaatgaggtcggaatcgaaggtttaacaacccgtaaactcgcccagaagctaggtgtagagcagcctacattgtattggcatgtaaaaaataagcgagctctgctcgacgccttagccattgagatgatggataggcaccaaactcacatttgccctttagaaggggaaagctggcaagattttttacgtaataatgctaaaagtatgagatgtgctttactaagccatcgcgatggagcaaaagtatgtttaggtacacgctggacagaaaaacaatatgaaagtgctgaaaatatgttagcctttttatgccaacaaggtttttcactagagaatgcattatatgcagtgagtgctgtgagggtgtttactttaggttgcgtattgtttgatcaagagctccaagtcgctaaagaagaaagggaaacacctactactgctagtatgccgccattagtgcgacaagtttgggaattaaaggatcaccaaggtgcagagccagccttcttattcggccttgaattgatcatatgcggattagaaaaacaacttaaatgcgaaagtgggtcttaa

SEQ ID NO: 589 - DNA, 627 bp, Artificial Sequence
  Sulfonylurea responsive repressor
atgggatctagattagataaaagtaaagtgattaacagcgcattagagctgcttaatgaggtcggaatcgaaggtttaacaacccgtaaactcgcccagaagctaggtgtagagcagcctacattgtattggcatgtaaaaaataagcgagctctgctcgacgccttagccattgagatgatggataggcacgcaactcacttgtgccctttagaaggggaaagctggcaagattttttacgtaataatgctaaaagtatgagatgtgctttactaagccatcgcgatggagcaaaagtatgtttaggtacacgctggacagaaaaacaatatgaagctgctgaaaatcaattagcctttttatgccaacaaggtttttcactagagaatgcattatatgcagtgagtgctgtgagggtgtttactttaggttgcgtattgtttgatcaagagagccaagtcgctaaagaagaaagggaaacacctactactgctagtatgccgccattattgcgacaagtttgggaattaaaggatcaccaaggtgcagagccagccttcttattcggccttgaattgatcatatgcggattagaaaaacaacttaaatgcgaaagtgggtcttaa

SEQ ID NO: 590 - DNA, 627 bp, Artificial Sequence
  Sulfonylurea responsive repressor
atgggatctagattagataaaagtaaagtgattaacagcgcattagagctgcttaatgaggtcggaatcgaaggtttaacaacccgtaaactcgcccagaagctaggtgtagagcagcctacattgtattggcatgtaaaaaataagcgagctctgctcgacgccttagccattgagatgatggataggcacgcaactcacttgtgccctttagaaggggaaagctggcaagattttttacgtaataatgctaaaagtatgagatgtgctttactaagccatcgcgatggagcaaaagtatgtttaggtacacgctggacagaacaattgtatgaaactgctgaaaatatgttagcctttttatgccaacaaggtttttcactagagaatgcattatatgcagtgagtgctgtgaggaactttactttaggttgcgtattgtttgatcaagagagccaagtcgctaaagaagaaagggaaacacctactactgctagtatgccgccattattgcgacaagtttgggaattaaaggatcaccaaggttcagagccagccttcttattcggccttgaattgatcatatgcggattagaaaaacaacttaaatgcgaaagtgggtcttaa

SEQ ID NO: 591 - DNA, 627 bp, Artificial Sequence
  Sulfonylurea responsive repressor
atgggatctagattagataaaagtaaagtgattaacagcgcattagagctgcttaatgaggtcggaatcgaaggtttaacaacccgtaaactcgcccagaagctaggtgtagagcagcctacattgtattggcatgtaaaaaataagcgagctctgctcgacgccttagccattgagatgatggataggcaccaaactcacatttgccctttagaaggggaaagctggcaagattttttacgtaataatgctaaaagtatgagatgtgctttactaagccatcgcgatggagcaaaagtatgtttaggtacacggtggacagaaaaacaatatgaaactgctgaaaatatgttagcctttttatgccaacaaggtttttcactagagaatgcattatatgcagtgagtgctgtgagggtgtttactttaggttgcgtattgtttgatcaagagctccaagtcgctaaagaagaaagggaaacacctactactgctagtatgccgccattagtgcgacaagcttgggaattaaaggatcaccaaggtgcagagccagccttcttattcggccttgaattgatcatatgcggattagaaaaacaacttaaatgcgaaagtgggtcttaa

SEQ ID NO: 592 - DNA, 627 bp, Artificial Sequence
  Sulfonylurea responsive repressor
atgggatctagattagataaaagtaaagtgattaacagcgcattagagctgcttaatgaggtcggaatcgaaggtttaacaacccgtaaactcgcccagaagctaggtgtagagcagcctacattgtattggcatgtaaaaaataagcgagctctgctcgacgccttagccattgagatgatggataggcaccaaactcacatgtgccctttagaaggggaaagctggcaagattttttacgtaataatgctaaaagtatgagatgtgctttactaagccatcgcgatggagcaaaagtatgtttaggtacacgctggacagaacaacaatatgaagctgctgaaaatatgttagcctttttatgccaacaaggtttttcactagagaatgcattatatgcaatgagtgctgtgaggaactttactttaggttgcgtattgtttgatcaagagagccaagtcgctaaagaagaaagggaaacacctactactgctagtatgccgccattattgcgacaagcttgggaattaaaggatcaccaaggtgcagagccagccttcttattcggccttgaattgatcatatgcggattagaaaaacaacttaaatgcgaaagtgggtcttaa

SEQ ID NO: 593 - DNA, 627 bp, Artificial Sequence
  Sulfonylurea responsive repressor
atgggatctagattagataaaagtaaagtgattaacagcgcattagagctgcttaatgaggtcggaatcgaaggtttaacaacccgtaaactcgcccagaagctaggtgtagagcagcctacattgtattggcatgtaaaaaataagcgagctctgctcgacgccttagccattgagatgatggataggcacgcaactcactattgccctttagaaggggaaagctggcaagattttttacgtaataatgctaaaagtatgagatgtgctttactaagccatcgcgatggagcaaaagtatgtttaggtacacgctggacagaaaaacaatatgaaactgctgaaaatcaattagcctttttatgccaacaaggtttttcactagagaatgcattatatgcaatgagtgctgtgagggtgtttactttaggttgcgtattgtttgatcaagagctccaagtcgctaaagaagaaagggaaacacctactactgctagtatgccgccattagtgcgacaagcttgggaattaaaggatcaccaaggtgcagagccagccttcttattcggccttgaattgatcatatgcggattagaaaaacaacttaaatgcgaaagtgggtcttaa

SEQ ID NO: 594 - DNA, 627 bp, Artificial Sequence
  Sulfonylurea responsive repressor
atgggatctagattagataaaagtaaagtgattaacagcgcattagagctgcttaatgaggtcggaatcgaaggtttaacaacccgtaaactcgcccagaagctaggtgtagagcagcctacattgtattggcatgtaaaaaataagcgagctctgctcgacgccttagccattgagatgatggataggcaccaaactcactattgccctttagaaggggaaagctggcaagattttttacgtaatactgctaaaagtatgagatgtgctttactaagccatcgcgatggagcaaaagtatgtttaggtacacgctggacagaaaaacaatatgaaactgctgaaaatatgttagcctttttatgccaacaaggtttttcactagagaatgcattatatgcagtgagtgctgtgagggtgtttactttaggttgcgtattgtttgatcaagagagccaagtcgctaaagaagaaagggaaacacctactactgctagtatgccgccattattgcgacaaggtttggaattaaaggatcaccaaggtgcagagccagccttcttattcggccttgaattgatcatatgcggattagaaaaacaacttaaatgcgaaagtgggtcttaa

SEQ ID NO: 595 - DNA, 627 bp, Artificial Sequence
  Sulfonylurea responsive repressor
  misc_feature 194: n = A,T,C or G
atgggatctagattagataaaagtaaagtgattaacagcgcattagagctgcttaatgaggtcggaatcgaaggtttaacaacccgtaaactcgcccagaagctaggtgtagagcagcctacattgtattggcatgtaaaaaataagcgagctctgctcgacgccttagccattgagatgatggataggcaccnaactcactattgccctttagaaggggaaagctggcaagattttttacgtaataatgctaaaagtatgagatgtgctttactaagccatcgcgatggagcaaaagtatgtttaggtacacgctggacagaaaaacattatgaaactgctgaaaatatgttagcctttttatgccaacaaggtttttcactagagaatgcattatatgcaatgagtgctgtgaggaactttactttaggtggcgtattgtttgatcaagagagccaagtcgctaaagaagaaagggaaacacctactactgctagtatgccgccattagcccgacaagtttgggaattaaaggatcaccaaggtgcagagccagccttcttattcggccttgaattgatcatatgcggattagaaaaacaacttaaatgcgaaagtgggtcttaa

SEQ ID NO: 596 - DNA, 627 bp, Artificial Sequence
  Sulfonylurea responsive repressor
atgggatctagattagataaaagtaaagtgattaacagcgcattagagctgcttaatgaggtcggaatcgaaggtttaacaacccgtaaactcgcccagaagctaggtgtagagcagcctacattgtattggcatgtaaaaaataagcgagctctgctcgacgccttagccattgagatgatggataggcaccaaactcacatttgccctttagaaggggaaagctggcaagattttttacgtaataatgctaaaagtatgagatgtgctttactaagccatcgcgatggagcaaaagtatgtttaggtacacgctggacagaaaaaatgtatgaaactgctgaaaatcaattagcctttttatgccaacaaggtttttcactagagaatgcattatatgcaatgagtgctgtgagggtgtttactttaggttgcgtattgtttgatcaagagctccaagtcgctaaagaagaaagggaaacacctactactgctagtatgccgccattattgcgacaagcttgggaattaaaggatcaccaaggtgcagagccagccttcttattcggccttgaattgatcatatgcggattagaaaaacaacttaaatgcgaaagtgggtcttaa

SEQ ID NO: 597 - DNA, 627 bp, Artificial Sequence
  Sulfonylurea responsive repressor
atgggatctagattagataaaagtaaagtgattaacagcgcattagagctgcttaatgaggtcggaatcgaaggtttaacaacccgtaaactcgcccagaagctaggtgtagagcagcctacattgtattggcatgtaaaaaataagcgagctctgctcgacgccttagccattgagatgatggataggcaccaaactcactattgccctttagaaggggaaagctggcaagattttttacgtaatactgctaaaagtatgagatgtgctttactaagccatcgcgatggagcaaaagtatgtttaggtacacgctggacagaacaacaatatgaaactgctgaaaatatgttagcctttttatgccaacaaggtttttcactagagaatgcattatatgcagtgagtgctgtgagggtgtttactttaggttgcgtattgtttgatcaagagagccaagtcgctaaagaagaaagggaaacacctactactgctagtatgccgccattattgcgacaagcttgggaattaaaggatcaccaaggtgcagagccagccttcttattcggccttgaattgatcatatgcggattagaaaaacaacttaaatgcgaaagtgggtcttaa

SEQ ID NO: 598 - DNA, 627 bp, Artificial Sequence
  Sulfonylurea responsive repressor
atgggatctagattagataaaagtaaagtgattaacagcgcattagagctgcttaatgaggtcggaatcgaaggtttaacaacccgtaaactcgcccagaagctaggtgtagagcagcctacattgtattggcatgtaaaaaataagcgagctctgctcgacgccttagccattgagatgatggataggcacgcaactcactattgccctttagaaggggaaagctggcaagattttttacgtaataatgctaaaagtatgagatgtgctttactaagccatcgcgatggagcaaaagtatgtttaggtacacgctggacagaacaacattatgaaactgctgaaaatcaattagcctttttatgccaacaaggtttttcactagagaatgcattatatgcagtgagtgctgtgagggtgtttactttaggttgcgtattgtttgatcaagagagccaagtcgctaaagaagaaagggaaacacctactactgctagtatgccgccattattgcgacaagtttgggaattaaaggatcaccaaggtgcagagccagccttcttattcggccttgaattgatcatatgcggattagaaaaacaacttaaatgcgaaagtgggtcttaa

SEQ ID NO: 599 - DNA, 627 bp, Artificial Sequence
  Sulfonylurea responsive repressor
atgggatctagattagataaaagtaaagtgattaacagcgcattagagctgcttaatgaggtcggaatcgaaggtttaacaacccgtaaactcgcccagaagctaggtgtagagcagcctacattgtattggcatgtaaaaaataagcgagctctgctcgacgccttagccattgagatgatggataggcacgcaactcacttgtgccctttagaaggggaaagctggcaagattttttacgtaataatgctaaaagtatgagatgtgctttactaagccatcgcgatggagcaaaagtatgtttaggtacacgctggacagaaaaacaatatgaaactgctgaaaatcaattagcctttttatgccaacaaggtttttcactagagaatgcattatatgcagtgagtgctgtgagggtgtttactttaggttgcgtattgtttgatcaagagagccaagtcgctaaagaagaaagggaaacacctactactgctagtatgccgccattattgcgacaagtttgggaattaaaggatcaccaaggtgcagagccagccttcttattcggccttgaattgatcatatgcggattagaaaaacaacttaaatgcgaaagtgggtcttaa

SEQ ID NO: 600 - DNA, 627 bp, Artificial Sequence
  Sulfonylurea responsive repressor
atgggatctagattagataaaagtaaagtgattaacagcgcattagagctgcttaatgaggtcggaatcgaaggtttaacaacccgtaaactcgcccagaagctaggtgtagagcagcctacattgtattggcatgtaaaaaataagcgagctctgctcgacgccttagccattgagatgatggataggcaccaaactcactattgccctttagaaggggaaagctggcaagattttttacgtaataatgctaaaagtatgagatgtgctttactaagccatcgcgatggagcaaaagtatgtttaggtacacgctggacagaacaacaatatgaaactgctgaaaatatgttagcctttttatgccaacaaggtttttcactagagaatgcattatatgcaatgagtgctgtgagggtgtttactttaggttgcgtattgtttgatcaagagagccaagtcgctaaagaagaaagggaaacacctactactgctagtatgccgccattattgcgacaagctttggaattaaaggatcaccaaggtgcagagccagccttcttattcggccttgaattgatcatatgcggattagaaaaacaacttaaatgcgaaagtgggtcttaa

SEQ ID NO: 601 - DNA, 627 bp, Artificial Sequence
  Sulfonylurea responsive repressor
atgggatctagattagataaaagtaaagtgattaacagcgcattagagctgcttaatgaggtcggaatcgaaggtttaacaacccgtaaactcgcccagaagctaggtgtagagcagcctacattgtattggcatgtaaaaaataagcgagctctgctcgacgccttagccattgagatgatggataggcaccaaactcacttttgccctttagaaggggaaagctggcaagattttttacgtaatactgctaaaagtatgagatgtgctttactaagccatcgcgatggagcaaaagtatgtttaggtacacgctggacagaacaattgtatgaagctgctgaaaatatgttagcctttttatgccaacaaggtttttcactagagaatgcattatatgcagtgagtgctgtgagggtgtttactttaggttgcgtattgtttgatcaagagagccaagtcgctaaagaagaaagggaaacacctactactgctagtatgccgccattattgcgacaaggttgggaattaaaggatcaccaaggtgcagagccagccttcttattcggccttgaattgatcatatgcggattagaaaaacaacttaaatgcgaaagtgggtcttaa

SEQ ID NO: 602 - DNA, 627 bp, Artificial Sequence
  Sulfonylurea responsive repressor
atgggatctagattagataaaagtaaagtgattaacagcgcattagagctgcttaatgaggtcggaatcgaaggtttaacaacccgtaaactcgcccagaagctaggtgtagagcagcctacattgtattggcatgtaaaaaataagcgagctctgctcgacgccttagccattgagatgatggataggcacgcaactcacttgtgccctttagaaggggaaagctggcaagattttttacgtaataatgctaaaagtatgagatgtgctttactaagccatcgcgatggagcaaaagtatgtttaggtacacgctggacagaacaattgtatgaaactgctgaaaatcaattagcctttttatgccaacaaggtttttcactagagaatgcattatatgcagtgagtgctgtgagggtgtttactttaggttgcgtattgtttgatcaagagagccaagtcgctaaagaagaaagggaaacacctactactgctagtatgccgccattattgcgacaagtttgggaattaaaggatcaccaaggtgcagagccagccttcttattcggccttgaattgatcatatgcggattagaaaaacaacttaaatgcgaaagtgggtcttaa

SEQ ID NO: 603 - DNA, 627 bp, Artificial Sequence
  Sulfonylurea responsive repressor
atgggatctagattagataaaagtaaagtgattaacagcgcattagagctgcttaatgaggtcggaatcgaaggtttaacaacccgtaaactcgcccagaagctaggtgtagagcagcctacattgtattggcatgtaaaaaataagcgagctctgctcgacgccttagccattgagatgatggataggcaccaaactcactattgccctttagaaggggaaagctggcaagattttttacgtaataatgctaaaagtatgagatgtgctttactaagccatcgcgatggagcaaaagtatgtttaggtacacgctggacagaacaaatgtatgaaggtgctgaaaatatgttagcctttttatgccaacaaggtttttcactagagaatgcattatatgcagtgagtgctgtgaggaactttactttaggttgcgtattgtttgatcaagagagccaagtcgctaaagaagaaagggaaacacctactactgctagtatgccgccattattgcgacaagcttgggaattaaaggatcaccaaggtgcagagccagccttcttattcggccttgaattgatcatatgcggattagaaaaacaacttaaatgcgaaagtgggtcttaa

SEQ ID NO: 604 - DNA, 627 bp, Artificial Sequence
  Sulfonylurea responsive repressor
atgggatctagattagataaaagtaaagtgattaacagcgcattagagctgcttaatgaggtcggaatcgaaggtttaacaacccgtaaactcgcccagaagctaggtgtagagcagcctacattgtattggcatgtaaaaaataagcgagctctgctcgacgccttagccattgagatgatggataggcacgcaactcactattgccctttagaaggggaaagctggcaagattttttacgtaataatgctaaaagtatgagatgtgctttactaagccatcgcgatggagcaaaagtatgtttaggtacacgctggacagaacaacaatatgaaactgctgaaaatcaattagcctttttatgccaacaaggtttttcactagagaatgcattatatgcaatgagtgctgtgagggtgtttactttaggttgcgtattgtttgatcaagagagccaagtcgctaaagaagaaagggaaacacctactagtgctagtatgccgccattagtgcgacaagtttgggaattaaaggatcaccaaggtgcagagccagccttcttattcggccttgaattgatcatatgcggattagaaaaacaacttaaatgcgaaagtgggtcttaa

SEQ ID NO: 605 - DNA, 627 bp, Artificial Sequence
  Sulfonylurea responsive repressor
atgggatctagattagataaaagtaaagtgattaacagcgcattagagctgcttaatgaggtcggaatcgaaggtttaacaacccgtaaactcgcccagaagctaggtgtagagcagcctacattgtattggcatgtaaaaaataagcgagctctgctcgacgccttagccattgagatgatggataggcaccaaactcactattgccctttagaaggggaaagctggcaagattttttacgtaatactgctaaaagtatgagatgtgctttactaagccatcgcgatggagcaaaagtatgtttaggtacacgctggacagaaaaacaatatgaagctgctgaaaatatgttagcctttttatgccaacaaggtttttcactagagaatgcattatatgcaatgagtgctgtgagggtgtttactttaggttgcgtattgtttgatcaagagagccaagtcgctaaagaagaaagggaaacacctactactgctagtatgccgccattattgcgacaagcttgggaattaaaggatcaccaaggtgcagagccagccttcttattcggccttgaattgatcatatgcggattagaaaaacaacttaaatgcgaaagtgggtcttaa

SEQ ID NO: 606 - DNA, 627 bp, Artificial Sequence
  Sulfonylurea responsive repressor
atgggatctagattagataaaagtaaagtgattaacagcgcattagagctgcttaatgaggtcggaatcgaaggtttaacaacccgtaaactcgcccagaagctaggtgtagagcagcctacattgtattggcatgtaaaaaataagcgagctctgctcgacgccttagccattgagatgatggataggcaccaaactcacttgtgccctttagaaggggaaagctggcaagattttttacgtaataatgctaaaagtatgagatgtgctttactaagccatcgcgatggagcaaaagtatgtttaggtacacgctggacagaacaattgtatgaagctgctgaaaatatgttagcctttttatgccaacaaggtttttcactagagaatgcattatatgcagtgagtgctgtgagggtgtttactttaggttgcgtattgtttgatcaagagagccaagtcgctaaagaagaaagggaaacacctactactgctagtatgccgccattagtgcgacaaggttgggaattaaaggatcaccaaggtgcagagccagccttcttattcggccttgaattgatcatatgcggattagaaaaacaacttaaatgcgaaagtgggtcttaa

SEQ ID NO: 607 - DNA, 627 bp, Artificial Sequence
  Sulfonylurea responsive repressor
atgggatctagattagataaaagtaaagtgattaacagcgcattagagctgcttaatgaggtcggaatcgaaggtttaacaacccgtaaactcgcccagaagctaggtgtagagcagcctacattgtattggcatgtaaaaaataagcgagctctgctcgacgccttagccattgagatgatggataggcaccaaactcactattgccctttagaaggggaaagctggcaagattttttacgtaatactgctaaaagtatgagatgtgctttactaagccatcgcgatggagcaaaagtatgtttaggtacacgctggacagaacaattgtatgaaactgctgaaaatcaattagcctttttatgccaacaaggtttttcactagagaatgcattatatgcaatgagtgctgtgagggtgtttactttaggttgcgtattgtttgatcaagagagccaagtcgctaaagaagaaagggaaacacctactactgctagtatgccgccattattgcgacaaggttgggaattaaaggatcaccaaggtgcagagccagccttcttattcggccttgaattgatcatatgcggattagaaaaacaacttaaatgcgaaagtgggtcttaa

SEQ ID NO: 608 - DNA, 627 bp, Artificial Sequence
  Sulfonylurea responsive repressor
atgggatctagattagataaaagtaaagtgattaacagcgcattagagctgcttaatgaggtcggaatcgaaggtttaacaacccgtaaactcgcccagaagctaggtgtagagcagcctacattgtattggcatgtaaaaaataagcgagctctgctcgacgccttagccattgagatgatggataggcaccaaactcactattgccctttagaaggggaaagctggcaagattttttacgtaatactgctaaaagtatgagatgtgctttactaagccatcgcgatggagcaaaagtatgtttaggtacacgctggacagaacaacattatgaagctgctgaaaatatgttagcctttttatgccaacaaggtttttcactagagaatgcattatatgcaatgagtgctgtgagggtgtttactttaggttgcgtattgtttgatcaagagagccaagtcgctaaagaagaaagggaaacacctactactgctagtatgccgccattattgcgacaagcttgggaattaaaggatcaccaaggtgcagagccagccttcttattgggccttgaattgatcatatgcggattagaaaaacaacttaaatgcgaaagtgggtcttaa

SEQ ID NO: 609 - DNA, 627 bp, Artificial Sequence
  Sulfonylurea responsive repressor
atgggatctagattagataaaagtaaagtgattaacagcgcattagagctgcttaatgaggtcggaatcgaaggtttaacaacccgtaaactcgcccagaagctaggtgtagagcagcctacattgtattggcatgtaaaaaataagcgagctctgctcgacgccttagccattgagatgatggataggcaccaaactcacatgtgccctttagaaggggaaagctggcaagattttttacgtaataatgctaaaagtatgagatgtgctttactaagccatcgcgatggagcaaaagtatgtttaggtacacgctggacagaaaaacaatatgaaggtgctgaaaatcaattagcctttttatgccaacaaggtttttcactagagaatgcattatatgcagtgagtgctgtgagggtgtttactttaggttgcgtattgtttgatcaagagagccaagtcgctaaagaagaaagggaaacacctactactgctagtatgccgccattagtgcgacaagtttgggaattaaaggatcaccaaggtgcagagccagccttcttattcggccttgaattgatcatatgcggattagaaaaacaacttaaatgcgaaagtgggtcttaa

SEQ ID NO: 610 - DNA, 627 bp, Artificial Sequence
  Sulfonylurea responsive repressor
atgggatctagattagataaaagtaaagtgattaacagcgcattagagctgcttaatgaggtcggaatcgaaggtttaacaacccgtaaactcgcccagaagctaggtgtagagcagcctacattgtattggcatgtaaaaaataagcgagctctgctcgacgccttagccatagagatgatggataggcaccaaactcacatttgccctttagaaggggaaagctggcaagattttttacgtaataatgctaaaagtatgagatgtgctttactaagccatcgcgatggagcaaaagtatgtttaggtacacgctggacagaacaacaatatgaaggtgctgaaaatcaattagcctttttatgccaacaaggtttttcactagagaatgcattatatgcaatgagtgctgtgagggtgtttactttaggttgcgtattgtttgatcaagagagccaagtcgctaaagaagaaagggaaacacctactactgctagtatgccgccattattgcgacaaggttgggaattaaaggatcaccaaggtgcagagccagccttcttattcggccttgaattgatcatatgcggattagaaaaacaacttaaatgcgaaagtgggtcttaa

SEQ ID NO: 611 - DNA, 627 bp, Artificial Sequence
  Sulfonylurea responsive repressor
atgggatctagattagataaaagtaaagtgattaacagcgcattagagctgcttaatgaggtcggaatcgaaggtttaacaacccgtaaactcgcccagaagctaggtgtagagcagcctacattgtattggcatgtaaaaaataagcgagctctgctcgacgccttagccattgagatgatggataggcacgcaactcacatgtgccctttagaaggggaaagctggcaagattttttacgtaataatgctaaaagtatgagatgtgctttactaagccatcgcgatggagcaaaagtatgtttaggtacacgctggacagaacaacattatgaaactgctgaaaatcaattagcctttttatgccaacaaggtttttcactagagaatgcattatatgcagtgagtgctgtgagggtgtttactttaggttgcgtattgtttgatcaagagagccaagtcgctaaagaagaaagggaaacacctactactgctagtatgccgccattattgcgacaaggttgggaattaaaggatcaccaaggtgcagagccagccttcttattcggccttgaattgatcatatgcggattagaaaaacaacttaaatgcgaaagtgggtcttaa

SEQ ID NO: 612 - DNA, 627 bp, Artificial Sequence
  Sulfonylurea responsive repressor
atgggatctagattagataaaagtaaagtgattaacagcgcattagagctgcttaatgaggtcggaatcgaaggtttaacaacccgtaaactcgcccagaagctaggtgtagagcagcctacattgtattggcatgtaaaaaataagcgagctctgctcgacgccttagccattgagatgatggataggcacgcaactcacatttgccctttagaaggggaaagctggcaagattttttacgtaataatgctaaaagtatgagatgtgctttactaagccatcgcgatggagcaaaagtatgtttaggtacacgctggacagaacaacaatatgaaactgctgaaaatatgttagcctttttatgccaacaaggtttttcactagagaatgcattatatgcagtgagtgctgtgagggtgtttactttaggttgcgtattgtttgatcaagagagccaagtcgctaaagaagaaagggaaacacctactactgctagtatgccgccattagtgcgacaagctttggaattaaaggatcaccaaggtgcagagccagccttcttattcggccttgaattgatcatatgcggattagaaaaacaacttaaatgcgaaagtgggtcttaa

SEQ ID NO: 613 - DNA, 627 bp, Artificial Sequence
  Sulfonylurea responsive repressor
atgggatctagattagataaaagtaaagtgattaacagcgcattagagctgcttaatgaggtcggaatcgaaggtttaacaacccgtaaactcgcccagaagctaggtgtagagcagcctacattgtattggcatgtaaaaaataagcgagctctgctcgacgccttagccattgagatgatggataggcacgcaactcacttttgccctttagaaggggaaagctggcaagattttttacgtaataatgctaaaagtatgagatgtgctttactaagccatcgcgatggagcaaaagtatggttaggtacacgctggacagaacaacaatatgaaactgctgaaaatatgttagcctttttatgccaacaaggtttttcactagagaatgcattatatgcagtgagtgctgtgagggtgtttactttaggttgcgtattgtttgatcaagagagacaagtcgctaaagaagaaagggaaacacctactactgctagtatgccgccattattgcgacaagtttgggaattaaaggatcaccaaggtgcagagccagccttcttattcggccttgaattgatcatatgcggattagaaaaacaacttaaatgcgaaagtgggtcttaa

SEQ ID NO: 614 - DNA, 627 bp, Artificial Sequence
  Sulfonylurea responsive repressor
atgggatctagattagataaaagtaaagtgattaacagcgcattagagctgcttaatgaggtcggaatcgaaggtttaacaacccgtaaactcgcccagaagctaggtgtagagcagcctacattgtattggcatgtaaaaaataagcgagctctgctcgacgccttagccattgagatgatggataggcaccaaactcacttttgccctttagaaggggaaagctggcaagattttttacgtaataatgctaaaagtatgagatgtgctttactaagccatcgcgatggagcaaaagtatgtttaggtacacgctggacagaacaacaatatgaagctgctgaaaatcaattagcctttttatgccaacaaggtttttcactagagaatgcattatatgcaatgagtgctgtgaggaactttactttaggttgcgtattgtttgatcaagagctccaagtcgctaaagaagaaagggaaacacctactactgctagtatgccgccattattgcgacaagtttgggaattaaaggatcaccaaggtgcagagccagccttcttattcggccttgaattgatcatatgcggattagaaaaacaacttaaatgcgaaagtgggtckkra

SEQ ID NO: 615 - DNA, 627 bp, Artificial Sequence
  Sulfonylurea responsive repressor
atgggatctagattagataaaagtaaagtgattaacagcgcattagagctgcttaatgaggtcggaatcgaaggtttaacaacccgtaaactcgcccagaagctaggtgtagagcagcctacattgtattggcatgtaaaaaataagcgagctctgctcgacgccttagccattgagatgatggataggcaccaaactcacgtttgccctttagaaggggaaagctggcaagattttttacgtaataatgctaaaagtatgagatgtgctttactaagccatcgcgatggagcaaaagtatgtttaggtacacgctggacagaacaaatgtatgaaactgctgaaaatatgttagcctttttatgccaacaaggtttttcactagagaatgcattatatgcaatgagtgctgtgagggtgtttactttaggttgcgtattgtttgatcaagagctccaagtcgctaaagaagaaagggaaacacctactactgctagtatgccgccattattgcgacaagcttgggaattaaaggatcaccaaggtgcagagccagccttcttattcggccttgaattgatcatatgcggattagaaaaacaacttaaatgcgaaagtgggtcttaa

SEQ ID NO: 616 - DNA, 627 bp, Artificial Sequence
  Sulfonylurea responsive repressor
  misc_feature 437, 602: n = A,T,C or G
atgggatctagattagataaaagtaaagtgattaacagcgcattagagctgcttaatgaggtcggaatcgaaggtttaacaacccgtaaactcgcccagaagctaggtgtagagcagcctacattgtattggcatgtaaaaaataagcgagctctgctcgacgccttagccattgagatgatggataggcaccaaactcactattgccctttagaaggggaaagctggcaagattttttacgtaataatgctaaaagtatgagatgtgctttactaagccatcgcgatggagcaaaagtatgtttaggtacacgctggacagaacaacattatgaaactgctgaaaatcaattagcctttttatgccaacaaggtttttcactagagaatgcattatatgcaatgagtgctgtgagggtgtttactttaggttgcgnattgtttgatcaagagagccaagtcgctaaagaagaaagggaaacacctactactgctagtatgccgccattagtgcgacaagtttgggaattaaaggatcaccaaggtgcagagccagccttcttattcggccttgaattgatcatatgcggattagaaaaacnacttaaatgcgaaagtgggtcttaa

SEQ ID NO: 617 - DNA, 627 bp, Artificial Sequence
  Sulfonylurea responsive repressor
atgggatctagattagataaaagtaaagtgattaacagcgcattagagctgcttaatgaggtcggaatcgaaggtttaacaacccgtaaactcgcccagaagctaggtgtagagcagcctacattgtattggcatgtaaaaaataagcgagctctgctcgacgccttagccattgagatgatggataggcaccaaactcactattgccctttagaaggggaaagctggcaagattttttacgtaatactgctaaaagtatgagatgtgctttactaagccatcgcgatggagcaaaagtatgtttaggtacacgctggacagaacaacattatgaaggtgctgaaaatatgttagcctttttatgccaacaaggtttttcactagagaatgcattatatgcagtgagtgctgtgagggtgtttactttaggttgcgtattgtttgatcaagagctccaagtcgctaaagaagaaagggaaacacctactactgctagtatgccgccattagtgcgacaaggttgggaattaaaggatcaccaaggtgcagagccagccttcttattcggccttgaattgatcatatgcggattagaaaaacaacttaaatgcgaaagtgggtcttaa

SEQ ID NO: 618 - DNA, 627 bp, Artificial Sequence
  Sulfonylurea responsive repressor
atgggatctagattagataaaagtaaagtgattaacagcgcattagagctgcttaatgaggtcggaatcgaaggtttaacaacccgtaaactcgcccagaagctaggtgtagagcagcctacattgtattggcatgtaaaaaataagcgagctctgctcgacgccttagccattgagatgatggataggcaccaaactcacgtttgccctttagaaggggaaagctggcaagattttttacgtaataatgctaaaagtatgagatgtgctttactaagccatcgcgatggagcaaaagtatgtttaggtacacgctggacagaacaacaatatgaagctgctgaaaatcaattagcctttttatgccaacaaggtttttcactagagaatgcattatatgcaatgagtgctgtgagggtgtttactttaggttgcgtattgtttgatcaagagctccaagtcgctaaagaagaaagggaaacacctactactgctagtatgccgccattattgcgacaagtttgggaattaaaggatcaccaaggtgcagagccagccttcttattcggccttgaattgatcatatgcggattagaaaaacaacttaaatgcgaaagtgggtcttaa

SEQ ID NO: 619 - DNA, 627 bp, Artificial Sequence
  Sulfonylurea responsive repressor
atgggatctagattagataaaagtaaagtgattaacagcgcattagagctgcttaatgaggtcggaatcgaaggtttaacaacccgtaaactcgcccagaagctaggtgtagagcagcctacattgtattggcatgtaaaaaataagcgagctctgctcgacgccttagccattgagatgatggataggcacgcaactcacttgtgccctttagaaggggaaagctggcaagattttttacgtaatactgctaaaagtatgagatgtgctttactaagccatcgcgatggagcaaaagtatgtttaggtacacgctggacagaacaacaatatgaaagtgctgaaaatatgttagcctttttatgccaacaaggtttttcactagagaatgcattatatgcaatgagtgctgtgagggtgtttactttaggttgcgtattgtttgatcaagagagccaagtcgctaaagaagaaagggaaacacctactactgctagtatgccgccattattgcgacaagcttgggaattaaaggatcaccaaggtgcagagccagccttcttattcggccttgaattgatcatatgcggattagaaaaacaacttaaatgcgaaagtgggtcttaa

SEQ ID NO: 620 - DNA, 627 bp, Artificial Sequence
  Sulfonylurea responsive repressor
atgggatctagattagataaaagtaaagtgattaacagcgcattagagctgcttaatgaggtcggaatcgaaggtttaacaacccgtaaactcgcccagaagctaggtgtagagcagcctacattgtattggcatgtaaaaaataagcgagctctgctcgacgccttagccattgagatgatggataggcaccaaactcactattgccctttagaaggggaaagctggcaagattttttacgtaatactgctaaaagtatgagatgtgctttactaagccatcgcgatggagcaaaagtatgtttaggtacacgctggacagaacaacaatatgaaagtgctgaaaatcaattagcctttttatgccaacaaggtttttcactagagaatgcattatatgcagtgagtgctgtgagggtgtttactttaggttgcgtattgtttgatcaagagctccaagtcgctaaagaagaaagggaaacacctactactgctagtatgccgccattattgcgacaagtttgggaattaaaggatcaccaaggtgcagagccagccttcttattcggccttgaattgatcatatgcggattagaaaaacaacttaaatgcgaaagtgggtcttaa

SEQ ID NO: 621 - DNA, 627 bp, Artificial Sequence
  Sulfonylurea responsive repressor
atgggatctagattagataaaagtaaagtgattaacagcgcattagagctgcttaatgaggtcggaatcgaaggtttaacaacccgtaaactcgcccagaagctaggtgtagagcagcctacattgtattggcatgtaaaaaataagcgagctctgctcgacgccttagccattgagatgatggataggcacgcaactcacgtttgccctttagaaggggaaagctggcaagattttttacgtaatactgctaaaagtatgagatgtgctttactaagccatcgcgatggagcaaaagtatgtttaggtacacgctggacagaacaacaatatgaaactgctgaaaatatgttagcctttttatgccaacaaggtttttcactagagaatgcattatatgcaatgagtgctgtgagggtgtttactttaggttgcgtattgtttgatcaagagagccaagtcgctaaagaagaaagggaaacacctactactgctagtatgccgccattattgcgacaagtttgggaattaaaggatcaccaaggtgcagagccagccttcttattcggccttgaattgatcatatgcggattagaaaaacaacttaaatgcgaaagtgggtcttaa

SEQ ID NO: 622 - DNA, 627 bp, Artificial Sequence
  Sulfonylurea responsive repressor
atgggatctagattagataaaagtaaagtgattaacagcgcattagagctgcttaatgaggtcggaatcgaaggtttaacaacccgtaaactcgcccagaagctaggtgtagagcagcctacattgtattggcatgtaaaaaataagcgagctctgctcgacgcattggccattgagatgctggataggcacgcgactcactattgccctttagaaggggaaagctggcaagattttttacgtaataacgctaaaagtatgagatgtgctttactaagtcatcgcgatggagcaaaagtatgtttaggtacaggctttacagaaaagcaatatgaaactgccgaaaatagtctggcctttttatgccaacaaggtttttcactcgagcacgcaatgtatgcaatgcaggctgctggtatttatactttaggttgcgtattgttggatcaagagcttcaagtcgctaaagaagaaagggaaacacctactactgatagtatgccgccattagtccgacaagttctggaattaaaggatcaccaaggtgcagagccagccttcttattcggccttgaattgatcatatgcggattagaaaaacaacttaaatgtgaaagtgggtcttaa

SEQ ID NO: 623 - DNA, 627 bp, Artificial Sequence
  Sulfonylurea responsive repressor
atgggatctagattagataaaagtaaagcgattaacagcgcattagagctgcttaatgaggtcggaatcgaaggtttaacaacccgtaaactcgcccagaagctaggtgtagagcagcctacattgtattggcatgtaaaaaataagcgagctctgctcgacgcaatggccattgagatgctggataggcacgcgactcactattgccctttagaaggggaaagctggcaagattttttacgtaataacgctaaaagtatgagatgtgctttactaagtcatcgcgatggagcaaaagtatgtttaggtacaggctttacagaacagcaatatgaagctgccgaaaatagtatggcctttttatgccaacaaggtttttcactagagcacgcactgtatgcaatgcaggctgctggtatttttactttaggttgcgtattgttggatcaagagcttcaagtcgctaaagaagaaagggaaacacctactactgatagtatgccgccattagtccgacaagttctggaattaaaggatcaccaaggtgcagagccagccttcttattcggccttgaattgatcatatgcggattagaaaaacaacttaaatgtgaaagtgggtcttaa

SEQ ID NO: 624 - DNA, 627 bp, Artificial Sequence
  Sulfonylurea responsive repressor
atgggatctagattagataaaagtaaagtgattaacagcgcattagagctgcttaatgaggtcggaatcgaaggtttaacaacccgtaaactcgcccagaagctaggtgtagagcagcctacattgtattggcatgtaaaaaataagcgagctctgctcgacgcattggccattgagatgctggataggcacgcgactcactattgccctttagaaggggaaagctggcaagattttttacgtaataacgctaaaagtatgagatgtgctttactaagtcatcgcgatggagcaaaagtatgtttaggtacaggctttacagaacagatgtatgaagctgccgaaaatagtatggcctttttatgccaacaaggtttttcactagagcacgcaatgtatgcaatgcaggctgttggtatttatactttaggttgcgtattgttggatcaagagcttcaagtcgctaaagaagaaagggaaacacctactactgatagtatgccgccattagtccgacaagttctggaattaaaggatcaccaaggtgcagagccagccttcttattcggccttgaattgatcatatgcggattagaaatacaacttaaatgtgaaagtgggtcttaa

SEQ ID NO: 625 - DNA, 627 bp, Artificial Sequence
  Sulfonylurea responsive repressor
atgggatctagattagataaaagtaaagygattaacagcgcattagagctgcttaatgaggtcggaatcgaaggtttaacaacccgtaaactcgcccagaagctaggtgtagagcagcctacattgtattggcatgtaaaaaataagcgagctctgctcgacgcaatggccattgagatgctggataggcacgcgactcactattgccctttagaaggggaaagctggcaagattttttacgtaataacgctaaaagtatgagatgtgctttactaagtcatcgcgatggagcaaaagtatgtttaggtacaggctttacagaacagcaatatgaaactgccgaaaatagtctggcctttttatgccaacaaggtttttcactagagaacgcactgtatgcaatgcaggctgttggtatttatactttaggttgcgtattgttggatcaagagcttcaagtcgctaaagaagaaagggaaacacctactactgatagtatgccgccattagtccgacaagttctggaattaaaggatcaccaaggtgcagagccagccttcttattcggccttgaattgatcatatgcggattagaaaaacaacttaaatgtgaaagtgggtcttaa

SEQ ID NO: 626 - DNA, 627 bp, Artificial Sequence
  Sulfonylurea responsive repressor
  misc_feature 27: n = A,T,C or G
atgggatctagattagataaaagtaanccgattaacagcgcattagagctgcttaatgaggtcggaatcgaaggtttaacaacccgtaaactcgcccagaagctaggtgtagagcagcctacattgtattggcatgtaaaaaataagcgagctctgctcgacgcattggccattgagatgctggataggcacgcgactcactattgccctttagaaggggaaagctggcaagattttttacgtaataacgctaaaagtatgagatgtgctttactaagtcatcgcgatggagcaaaagtatgtttaggtacaggctttacagaacagcaatatgaaagtgccgaaaatagtatggcctttttatgccaacaaggtttttcactagagcacgcactgtatgcaatgcaggctgttggtatttttactttaggttgcgtattgttggatcaagagcttcaagtcgctaaagaagaaagggaaacacctactactgatagtatgccgccattactccgacaagctctggaattaaaggatcaccaaggtgcagagccagccttcttattcggccttgaattgatcatatgcggattagaaaaacaacttaaatgtgaaagtgggtcttaa

SEQ ID NO: 627 - DNA, 627 bp, Artificial Sequence
  Sulfonylurea responsive repressor
atgggatctagattagataaaagtaaagtgattaacagcgcattagagctgcttaatgaggtcggaatcgaaggtttaacaacccgtaaactcgcccagaagctaggtgtagagcagcctacattgtattggcatgtaaaaaataagcgagctctgctcgacgcaatggccattgagatgctggataggcacgcgactcacatctgccctttagaaggggaaagctggcaagattttttacgtaataacgctaaaagtatgagatgtgctttactaagtcatcgcgatggagcaaaagtatgtttaggtacaggctttacagaacagcaatatgaaagtgccgaaaatagtatggcctttttatgccaacaaggtttttcactagagaacgcaatgtatgcaatgcaggctgttggtatttttactttaggttgcgtattgttggatcaagagcttcaagtcgctaaagaagaaagggaaacacctactactgatagtatgccgccattagtccgacaagttctggaattaaaggatcaccaaggtgcagagccagccttcttattcggccttgaattgatcatatgcggattagaaaaacaacttaaatgtgaaagtgggtcttaa

SEQ ID NO: 628 - DNA, 627 bp, Artificial Sequence
  Sulfonylurea responsive repressor
atgggatctagattagataaaagtaaagtgattaacagcgcattagagctgcttaatgaggtcggaatcgaaggtttaacaacccgtaaactcgcccagaagctaggtgtagagcagcctacattgtattggcatgtaaaaaataagcgagctctgctcgacgcaatggccattgagatgctggataggcacgcgactcacgtctgccctttagaaggggaaagctggcaagattttttacgtaataacgctaaaagtatgagatgtgctttactaagtcatcgcgatggagcaaaagtatgtttaggtacaggctttacagaacagcaatatgaaactgccgaaaatagtatggcctttttatgccaacaaggtttttcactagagaacgcaatgtatgcaatgcaggctgttggtatttttactttaggttgcgtattgttggatcaagagcttcaagtcgctaaagaagaaagggaaacacctactactgatagtatgccgccattagtccgacaagctctggaattaaaggatcaccaaggtgcagagccagccttcttattcggccttgaattgatcatatgcggattagaaaaacaacttaaatgtgaaagtgggtcttaa

SEQ ID NO: 629 - DNA, 627 bp, Artificial Sequence
  Sulfonylurea responsive repressor
atgggatctagattagataaaagtaaagtgattaacagcgcattagagctgcttaatgaggtcggaatcgaaggtttaacaacccgtaaactcgcccagaagctaggtgtagagcagcctacattgtattggcatgtaaaaaataagcgagctctgctcgacgcaatggccattgagatgctggataggcacgcgactcactattgccctttagaaggggaaagctggcaagattttttacgtaataacgctaaaagtatgagatgtgctttactaagtcatcgcgatggagcaaaagtatgtttaggtacaggctttacagaacagatgtatgaaactgccgaaaatagtatggcctttttatgccaacaaggtttttcactagagcacgcactgtatgcaatgcaggctgttggtatttatactgtaggttgcgtattgttggatcaagagcttcaagtcgctaaagaagaaagggaaacacctactactgatagtatgccgccattagtccgacaaggtcttgaattaaaggatcaccaaggtgcagagccagccttcttattcggccttgaattgatcatatgcggattagaaaaacaacttaaatgtgaaagtgggtcttaa

SEQ ID NO: 630 - DNA, 627 bp, Artificial Sequence
  Sulfonylurea responsive repressor
  misc_feature 330: n = A,T,C or G
atgggatctagattagataaaagtaaagcgattaacagcgcattagagctgcttaatgaggtcggaatcgaaggtttaacaacccgtaaactcgcccagaagctaggtgtagagcagcctacattgtattggcatgtaaaaaataagcgagctctgctcgacgcaatggccattgagatgctggataggcacgcgactcactattgccctttagaaggggaaagctggcaagattttttacgtaataacgctaaaagtatgagatgtgctttactaagtcatcgcgatggagcaaaagtatgtttaggtacaggctttacagaacagcantatgaagctgccgaaaatagtatggcctttttatgccaacaaggtttttcactagagaacgcaatgtatgcaatgcaggctgttggtatttatactttaggttgcgtattgttggatcaagagcttcaagtcgctaaagaagaaagggaaacacctactactgatagtatgccgccattagtccgacaagttctggaattaaaggatcaccaaggtgcagagccagccttcttattcggccttgaattgatcatatgcggattagaaaaacaacttaaatgtgaaagtgggtcttaa

SEQ ID NO: 631 - DNA, 627 bp, Artificial Sequence
  Sulfonylurea responsive repressor
  misc_feature 166, 329, 330, 413, 415: n = A,T,C or G
atgggatctagattagataaaagtaaagtgattaacagcgcattagagctgcttaatgaggtcggaatcgaaggtttaacaacccgtaaactcgcccagaagctaggtgtagagcagcctacattgtattggcatgtaaaaaataagcgagctctgctcgacgcantggccattgagatgctggataggcacgcgactcactattgccctttagaaggggaaagctggcaagattttttacgtaataacgctaaaagtatgagatgtgctttactaagtcatcgcgatggagcaaaagtatgtttaggtacaggctttacagaacagcnntatgaaactgccgaaaatagtctggcctttttatgccaacaaggtttttcactagagaacgcaatgtatgcaatgcaggctgntngtatttatactttaggttgcgtattgttggatcaagagcttcaagtcgctaaagaagaaagggaaacacctactactgatagtatgccgccattagtccgacaagctctggaattaaaggatcaccaaggtgcagagccagccttcttattcggccttgaattgatcatatgcggattagaaaaacaacttaaatgtgaaagtgggtcttaa

SEQ ID NO: 632 - DNA, 627 bp, Artificial Sequence
  Sulfonylurea responsive repressor
atgggatctagattagataaaagtaaagtgattaacagcgcattagagctgcttaatgaggtcggaatcgaaggtttaacaacccgtaaactcgcccagaagctaggtgtagagcagcctacattgtattggcatgtaaaaaataagcgagctctgctcgacgcaatggccattgagatgctggataggcacgcgactcactatggccctttagaaggggaaagctggcaagattttttacgtaataacgctaaaagtatgagatgtgctttactaagtcatcgcgatggagcaaaagtatgtttaggtacaggctttacagaacagcaatatgaaactgccgaaaatagtatggcctttttatgccaacaaggtttttcactagagaacgcaatgtatgcaatgcaggctgtttgtatttatactttaggttgcgtattgttggatcaagagcttcaagtcgctaaagaagaaagggaaacacctactacagatagtatgccgccattagtccgacaagttctggaattaaaggatcaccaaggtgcagagccagccttcttattcggccttgaattgatcatatgcggattagaaaaacaacttaaatgtgaaagtgggtcttaa

SEQ ID NO: 633 - DNA, 627 bp, Artificial Sequence
  Sulfonylurea responsive repressor
atgggatctagattagataaaagtaaagygattaacagcgcattagagctgcttaatgaggtcggaatcgaaggtttaacaacccgtaaactcgcccagaagctaggtgtagagcagcctacattgtattggcatgtaaaaaataagcgagctctgctcgacgcaatggccattgagatgctggataggcacgcgactcactattgccctttagaaggggaaagctggcaagattttttacgtaataacgctaaaagtatgagatgtgctttactaagtcatcgcgatggagcaaaagtatgtttaggtacaggctttacagaaaagatgtatgaaggtgccgaaaatagtatggcctttttatgccaacaaggtttttcactagagcacgcaatgtatgcaatgcaggctgctggtatttttactttaggttgcgtattgttggatcaagagcttcaagtcgctaaagaagaaagggaaacacctactactgatagtatgccgccattagtccgacaagctctggaattaaaggatcaccaaggtgcagagccagccttcttattcggccttgaattgatcatatgcggattagaaaaacaacttaaatgtgaaagtgggtcttaa

SEQ ID NO: 634 - DNA, 627 bp, Artificial Sequence
  Sulfonylurea responsive repressor
atgggatctagattagataaaagtaaagtgattaacagcgcattagagctgcttaatgaggtcggaatcgaaggtttaacaacccgtaaactcgcccagaagctaggtgtagagcagcctacattgtattggcatgtaaaaaataagcgagctctgctcgacgcaatggccattgagatgctggataggcacgcgactcactattgccctttagaaggggaaagctggcaagattttttacgtaataacgctaaaagtatgagatgtgctttactaagtcatcgcgatggagcaaaagtatgtttaggtacaggctttacagaacagcaatatgaaactgccgaaaatagtctggcctttttatgccaacaaggtttttcactagagcacgcaatgtatgcaatgcaggctgttggtatttttactttaggttgcgtattgttggatcaagagcttcaagtcgctaaagaagaaagggaaacacctactactgatagtatgccgccattagtccgacaagctctggaattaaaggatcaccaaggtgcagagccagccttcttattcggccttgaattgatcatatgcggattagaaaaacaacttaaatgtgaaagtgggtcttaa

SEQ ID NO: 635 - DNA, 627 bp, Artificial Sequence
  Sulfonylurea responsive repressor
atgggatctagattagataaaagtaaagcgattaacagcgcattagagctgcttaatgaggtcggaatcgaaggtttaacaacccgtaaactcgcccagaagctaggtgtagagcagcctacattgtattggcatgtaaaaaataagcgagctctgctcgacgcaatggccattgagatgctggataggcacgcgactcacgtctgccctttagaaggggaaagctggcaagattttttacgtaataacgctaaaattatgagatgtgctttactaagtcatcgcgatggagcaaaagtatgtttaggtacaggctttacagaacagcaatatgaaactgccgaaaatagtctggcctttttatgccaacaaggtttttcactagagcacgcactgtatgcaatgcaggctgctggtatttttactttaggttgcgtattgttggatcaagagcttcaagtcgctaaagaagaaagggaaacacctactactgatagtatgccgccattagtccgacaagctctggaattaaatgatcaccaaggtgcagagccagccttcttattcggccttgaattgatcatatgcggattagaaaaacaacttaaatgtgaaagtgggtcttaa

SEQ ID NO: 636 - DNA, 627 bp, Artificial Sequence
  Sulfonylurea responsive repressor
atgggatctagattagataaaagtaaagcgattaacagcgcattagagctgcttaatgaggtcggaatcgaaggtttaacaacccgtaaactcgcccagaagctaggtgtagagcagcctacattgtattggcatgtaaaaaataagcgagctctgctcgacgcattggccattgagatgctggataggcacgcgactcactattgccctttagaaggggaaagctggcaagattttttacgtaataacgctaaaagtatgagatgtgctttactaagtcatcgcgatggagcaaaagtatgtttaggtacaggctttacagaacagatgtatgaaactgccgaaaatagtatggcctttttatgccaacaaggtttttcactagagaacgcaatgtatgcaatgcaggctgctggtatttatactttaggttgcgtattgttggatcaagagcttcaagtcgctaaagaagaaagggaaacacctactactgatagtatgccgccattagtccgacaagttctggaattaaaggatcaccaaggtgcagagccagccttcttattcggccttgaattgatcatatgcggattagaaaaacaacttaaatgtgaaagtgggtcttaa

SEQ ID NO: 637 - DNA, 627 bp, Artificial Sequence
  Sulfonylurea responsive repressor
atgggatctagattagataaaagtaaagtgattaacagcgcattagagctgcttaatgaggtcggaatcgaaggtttaacaacccgtaaactcgcccagaagctaggtgtagagcagcctacattgtattggcatgtaaaaaataagcgagctctgctcgacgcaatggccattgagatgctggataggcacgcgactcactattgccctttagaagggaaaagctggcaagattttttacgtaataacgctaaaagtatgagatgtgctttactaagtcatcgcgatggagcaaaagtatgtttaggtacaggctttacagaacagcaatatgaaagtgccgaaaatagtatggcctttttatgccaacaaggtttttcactagagcacgcaatgtatgcaatgcaggctgctggtatttttactttaggttgcgtattgttggatcaagagcttcaagtcgctaaagaagaaagggaaacacctactactgatagtatgccgccattactccgacaagctctggaattaaaggatcaccaaggtgcagagccagccttcttattcggccttgaattgatcatatgcggattagaaaaacaacttaaatgtgaaagtgggtcttaa

SEQ ID NO: 638 - DNA, 627 bp, Artificial Sequence
  Sulfonylurea responsive repressor
atgggatctagattagataaaagtaaagygattaacagcgcattagagctgcttaatgaggtcggaatcgaaggtttaacaacccgtaaactcgcccagaagctaggtgtagagcagcctacattgtattggcatgtaaaaaataagcgagctctgctcgacgcattggccattgagatgctggataggcacgcgactcactattgccctttagaaggggaaagctggcaagattttttacgtaataacgctaaaagtatgagatgtgctttactaagtcatcgcgatggagcaaaagtatgtttaggtacaggctttacagaacagatgtatgaaagtgccgaaaatagtctggcctttttatgccaacaaggtttttcactagagcacgcaatgtatgcaatgcaggctgctggtatttatactttaggttgcgtattgttggatcaagagcttcaagtcgctaaagaagaaagggaaacacctactactgatagtatgccgccattagtccgacaaggtctggaattaaaggatcaccaaggtgcagagccagccttcttattcggccttgaattgatcatatgcggattagaaaaacaacttaaatgtgaaagtgggtcttaa

SEQ ID NO: 639 - DNA, 627 bp, Artificial Sequence
  Sulfonylurea responsive repressor
atgggatctagattagataaaagtaaagcgattaacagcgcattagagctgcttaatgaggtcggaatcgaaggtttaacaacccgtaaactcgcccagaagctaggtgtagagcagcctacattgtattggcatgtaaaaaataagcgagctctgctcgacgcaatggccattgagatgctggataggcacgcgactcactattgccctttagaaggggaaagctggcaagattttttacgtaataacgctaaaagtatgagatgtgctttactaagtcatcgcgatggagcaaaagtatgtttaggtacaggctttacagaacagcaatatgaaggtgccgaaaatagtatggcctttttatgccaacaaggtttttcactagagaacgcaatgtatgcaatgcaggctgttggtatttttactttaggttgcgtattgttggatcaagagcttcaagtcgctaaagaagaaagggaaacacctactactgatagtatgccgccattagtccgacaaggtctggaattaaaggatcaccaaggtgcagagccagccttcttattcggccttgaattgatcatatgcggattagaaaaacaacttaaatgtgaaagtgggtcttaa

SEQ ID NO: 640 - DNA, 627 bp, Artificial Sequence
  Sulfonylurea responsive repressor
atgggatctagattagataaaagtaaagygattaacagcgcattagagctgcttaatgaggtcggaatcgaaggtttaacaacccgtaaactcgcccagaagctaggtgtagagcagcctacattgtattggcatgtaaaaaataagcgagctctgctcgacgcaatggccattgagatgctggataggcacgcgactcactattgccctttagaaggggaaagctggcaagattttttacgtaataacgctaaaagtatgagatgtgctttactaagtcatcgcgatggagcaaaagtatgtttaggtacaggctttacagaacagcaatatgaaactgccgaaaatagtctggcctttttatgccaacaaggtttttcactagagcacgcactgtatgcaatgcaggctgttggtatttatactttaggttgcgtattgttggatcaagagcttcaagtcgctaaagaagaaagggaaacacctactactgatagtatgccgccattagctcgacaagctctggaattaaaggatcaccaaggtgcagagccagccttcttattcggccttgaattgatcatatgcggattagaaaaacaacttaaatgtgaaagtgggtcttaa

SEQ ID NO: 641 - DNA, 627 bp, Artificial Sequence
  Sulfonylurea responsive repressor
atgggatctagattagataaaagtaaagygattaacagcgcattagagctgcttaatgaggtcggaatcgaaggtttaacaacccgtaaactcgcccagaagctaggtgtagagcagcctacattgtattggcatgtaaaaaataagcgagctctgctcgacgcattggccattgagatgctggataggcacgcgactcactattgccctttagaaggggaaagctggcaagattttttacgtaataacgctaaaagtatgagatgtgctttactaagtcatcgcgatggagcaaaagtatgtttaggtacaggctttacagaacagcactatgaaactgccgaaaatagtatggcctttttatgccaacaaggtttttcactagagaacgcactgtatgcaatgcaggctgttggtatttttactttaggttgcgtattgttggatcaagagcttcaagtcgctaaagaagaaagggaaacacctactactgatagtatgccgccattagtccgacaagctctggaattaaaggatcaccaaggtgcagagccagccttcttattcggccttgaattgatcatatgcggattagaaaaacaacttaaatgtgaaagtgggtcttaa

SEQ ID NO: 642 - DNA, 627 bp, Artificial Sequence
  Sulfonylurea responsive repressor
  misc_feature 29: n = A,T,C or G
atgggatctagattagataaaagtaaagngattaacagcgcattagagctgcttaatgaggtcggaatcgaaggtttaacaacccgtaaactcgcccagaagctaggtgtagagcagcctacattgtattggcatgtaaaaaataagcgagctctgctcgacgcaatggccattgagatgctggataggcacgcgactcactattgccctttagaaggggaaagctggcaagattttttacgtaataacgctaaaagtatgagatgtgctttactaagtcatcgcgatggagcaaaagtatgtttaggtacaggctttacagaacagcaatatgaaagtgccgaaaatagtatggcctttttatgccaacaaggtttttcactagagaacgcaatgtatgcaatgcaggctgttggtatttatactttaggttgcgtattgttggatcaagagcttcaagtcgctaaagaagaaagggaaacacctactactgatagtatgccgccattactccgacaagttctggaattaaaggatcaccaaggtgcagagccagccttcttattcggccttgaattgatcatatgcggattagaaaaacaacttaaatgtgaaagtgggtcttaa

SEQ ID NO: 643 - DNA, 627 bp, Artificial Sequence
  Sulfonylurea responsive repressor
atgggatctagattagataaaagtaaagygattaacagcgcattagagctgcttaatgaggtcggaatcgaaggtttaacaacccgtaaactcgcccagaagctaggtgtagagcagcctacattgtattggcatgtaaaaaataagcgagctctgctcgacgcattggccattgagatgctggataggcacgcgactcactattgccctttagaaggggaaagctggcaagattttttacgtaataacgctaaaagtatgagatgtgctttactaagtcatcgcgatggagcaaaagtatgtttaggtacaggctttacagaaaagcaatatgaagctgccgaaaatagtctggcctttttatgccaacaaggtttttcactagagcacgcactgtatgcaatgcaggctgctggtatttatactttaggttgcgtattgttggatcaagagcttcaagtcgctaaagaagaaagggaaacacctactactgatagtatgccgccattagtccgacaagctctggaattaaaggatcaccaaggtgcagagccagccttcttattcggccttgaattgatcatatgcggattagaaaaacaacttaaatgtgaaagtgggtcttaa

SEQ ID NO: 644 - DNA, 627 bp, Artificial Sequence
  Sulfonylurea responsive repressor
atgggatctagattagataaaagtaaagtgattaacagcgcattagagctgcttaatgaggtcggaatcgaaggtttaacaacccgtaaactcgcccagaagctaggtgtagagcagcctacattgtattggcatgtaaaaaataagcgagctctgctcgacgcaatggccattgagatgctggataggcacgcgactcactattgccctttagaaggggaaagctggcaagattttttacgtaataacgctaaaagtatgagatgtgctttactaagtcatcgcgatggagcaaaagtatgtttaggtacaggctttacagaacagcactatgaaactgccgaaaatagtatggcctttttatgccaacaaggtttttcactagagcacgcactgtatgcaatgcaggctgctggtatttatactttaggttgcgtattgttggatcaagagcttcaagtcgctaaagaagaaagggaaacacctactactgatagtatgccgccattagtccgacaagctctggaattaaaggatcaccaaggtgcagagccagccttcttattcggccttgaattgatcatatgcggattagaaaaacaacttaaatgtgaaagtgggtcttaa

SEQ ID NO: 645 - DNA, 627 bp, Artificial Sequence
  Sulfonylurea responsive repressor
atgggatctagattagataaaagtaaagygattaacagcgcattagagctgcttaatgaggtcggaatcgaaggtttaacaacccgtaaactcgcccagaagctaggtgtagagcagcctacattgtattggcatgtaaaaaataagcgagctctgctcgacgcaatggccattgagatgctggataggcacgcgacacactattgccctttagaaggggaaagctggcaagattttttacgtaataacgctaaaagtatgagatgtgctttactaagtcatcgcgatggagcaaaagtatgtttaggtacaggctttacagaacagcactatgaaactgccgaaaatagtatggcctttttatgccaacaaggtttttcactagagaacgcaatgtatgcaatgcaggctgttggtatttatactttaggttgcgtattgttggatcaagagcttcaagtcgctaaagaagaaagggaaacacctactactgatagtatgccgccattagtccgacaagctctggaattaaaggatcaccaaggtgcagagccagccttcttattcggccttgaattgatcatatgcggattagaaaaacaacttaaatgtgaaagtgggtcttaa

SEQ ID NO: 646 - DNA, 627 bp, Artificial Sequence
  Sulfonylurea responsive repressor
atgggatctagattagataaaagtaaagtgattaacagcgcattagagctgcttaatgaggtcggaatcgaaggtttaacaacccgtaaactcgcccagaagctaggtgtagagcagcctacattgtattggcatgtaaaaaataagcgagctctgcttgacgcaatggccattgagatgctggataggcacgcgactcactattgccctttagaaggggaaagctggcaagattttttacgtaataacgctaaaagtatgagatgtgctttactaagtcatcgcgatggagcaaaagtatgtttaggtacaggctttacagaacagcaatatgaaactgccgaaaatagtatggcctttttatgcaaacaaggtttttcactagagaacgcaatgtatgcaatgcaggctgttggtatttatactttaggttgcgtattgttggatcaagagcttcaagtcgctaaagaagaaagggaaacacctactactgatagtatgccgccattagtccgacaagttctggaattaaaggatcaccaaggtgcagagccagccttcttattcggccttgaattgatcatatgcggattagaaaaacaacttaaatgtgaaagtgggtcttaa

SEQ ID NO: 647 - DNA, 627 bp, Artificial Sequence
  Sulfonylurea responsive repressor
  misc_feature 166, 338, 352, 521: n = A,T,C or G
atgggatctagattagataaaagtaaagtgattaacagcgcattagagctgcttaatgaggtcggaatcgaaggtttaacaacccgtaaactcgcccagaagctaggtgtagagcagcctacattgtattggcatgtaaaaaataagcgagctctgctcgacgcantggccattgagatgctggataggcacgcgactcactattgccctttagaaggggaaagctggcaagattttttacgtaataacgctaaaagtatgagatgtgctttactaagtcatcgcgatggagcaaaagtatgtttaggtacaggctttacagaacagcactatgaaantgccgaaaatagtntggcctttttatgccaacaaggtttttcactagagcacgcactgtatgcaatgcaggctgttggtatttatactttaggttgcgtattgttggatcaagagcttcaagtcgctaaagaagaaagggaaacacctactactgatagtatgccgccattagtccgacaagntctggaattaaaggatcaccaaggtgcagagccagccttcttattcggccttgaattgatcatatgcggattagaaaaacaacttaaatgtgaaagtgggtcttaa

SEQ ID NO: 648 - DNA, 627 bp, Artificial Sequence
  Sulfonylurea responsive repressor
atgggatctagattagataaaagtaaagtgattaacagcgcattagagctgcttaatgaggtcggaatcgaaggtttaacaacccgtaaactcgcccagaagctaggtgtagagcagcctacattgtattggcatgtaaaaaataagcgagctctgctcgacgcattggccattgagatgctggataggcacgcgactcactattgccctttagaaggggaaagctggcaagattttttacgtaataacgctaaaagtatgagatgtgctttactaagtcatcgcgatggagcaaaagtatgtttaggtacaggctttacagaacagcactatgaaagtgccgaaaatagtctggcctttttatgccaacaaggtttttcactagagaacgcaatgtatgcaatgcaggctgttggtatttttactttaggttgcgtattgttggatcaagagcttcaagtcgctaaagaagaaagggaaacacctactactgatagtatgccgccattagtccgacaagttctggaattaaaggatcaccaaggtgcagagccagccttcttattcggccttgaattgatcatatgcggattagaaaaacaacttaaatgtgaaagtgggtcttaa

SEQ ID NO: 649 - DNA, 627 bp, Artificial Sequence
  Sulfonylurea responsive repressor
atgggatctagattagataaaagtaaagcgattaacagcgcattagagctgcttaatgaggtcggaatcgaaggtttaacaacccgtaaactcgcccagaagctaggtgtagagcagcctacattgtattggcatgtaaaaaataagcgagctctgctcgacgcaatggccattgagatgctggataggcacgcgactcactattgccctttagaaggggaaagctggcaagattttttacgtaataacgctaaaagtatgagatgtgctttactaagtcatcgcgatggagcaaaagtatgtttaggtacaggctttacagaacagcaatatgaaactgccgaaaatagtctggcctttttatgccaacaaggtttttcactagagaacgcactgtatgcaatgcaggctgttggtatttatactttaggttgcgtattgttggatcaagagcttcaagtcgctaaagaagaaagggaaacacctactactgatagtatgccgccattagtccgccaagttctggaattaaaggatcaccaaggtgcagagccagccttcttattcggccttgaattgatcatatgcggattagaaaaacaacttaaatgtgaaagtgggtcttaa

SEQ ID NO: 650 - DNA, 627 bp, Artificial Sequence
  Sulfonylurea responsive repressor
atgggatctagattagataaaagtaaagtgattaacagcgcattagagctgcttaatgaggtcggaatcgaaggtttaacaacccgtaaactcgcccagaagctaggtgtagagcagcctacattgtattggcatgtaaaaaataagcgagctctgctcgacgcaatggccattgagatgctggataggcacgcgactcactattgccctttagaaggggaaagctggcaagattttttacgtaataacgctaaaagtatgagatgtgctttactaagtcatcgcgatggagcaaaagtatgtttaggtacaggctttacagaacagcaatatgaagctgccgaaaatagtatggcctttttatgccaacaagatttttcactagagcacgcaatgtatgcaatgcaggctgttggtatttatactttaggttgcgtattgttggatcaagagcttcaagtcgctaaagaagaaagggaaacacctactactgatagtatgccgccattagtccgacaaggtctggaattaaaggatcaccaaggtgcagagccagccttcttattcggccttgaattgatcatatgcggattagaaaaacaacttaaatgtgaaagtgggtcttaa

SEQ ID NO: 651 - DNA, 627 bp, Artificial Sequence
  Sulfonylurea responsive repressor
  misc_feature 337, 338: n = A,T,C or G
atgggatctagattagataaaagtaaagtgattaacagcgcattagagctgcttaatgaggtcggaatcgaaggtttaacaacccgtaaactcgcccagaagctaggtgtagagcagcctacattgtattggcatgtaaaaaataagcgagctctgctcgacgcaatggccattgagatgctggataggcacgcgactcactattgccctttagaagggaaaagctggcaagattttttacgtaataacgctaaaagtatgagatgtgctttactaagtcatcgcgatggagcaaaagtatgtttaggtacaggctttacagaacagcactatgaanntgccgaaaatagtatggcctttttatgccaacaaggtttttcactagagcacgcaatgtatgcaatgcaggctgctggtatttttactttaggttgcgtattgttggatcaagagcttcaagtcgctaaagaagaaagggaaacacctactactgatagtatgccgccattactccgacaagctctggaattaaaggatcaccaaggtgcagagccagccttcttattcggccttgaattgatcatatgcggattagaaaaacaacttaaatgtgaaagtgggtcttaa

SEQ ID NO: 652 - DNA, 627 bp, Artificial Sequence
  Sulfonylurea responsive repressor
atgggatctagattagataaaagtaaagtgattaacagcgcattagagctgcttaatgaggtcggaatcgaaggtttaacaacccgtaaactcgcccagaagctaggtgtagagcagcctacattgtattggcatgtaaaaaataagcgagctctgctcgacgcaatggccattgagatgctggataggcacgcgactcactattgccctttagaaggggaaagctggcaagattttttacgtaataacgctaaaagtatgagatgtgctttactaagtcatcgcgatggagcaaaagtatgtttaggtacaggctttacagaacagcaatatgaaactgccgaaaatagtctggcctttttatgccaacaaggtttttcactagagcacgcaatgtatgcaatgcaggctgctggtatttatactttaggttgcgtattgttggatcaagagcttcaagtcgctaaagaagaaagggaaacacctactactgatagtatgccgccattagtccgacaagctctggaattaaaggatcaccaaggtgcagagccagccttcttattcggccttgaattgatcatatgcggattagaaaaacaacttaaatgtgaaagtgggtcttaa

SEQ ID NO: 653 - DNA, 627 bp, Artificial Sequence
  Sulfonylurea responsive repressor
atgggatctagattagataaaagtaaagygattaacagcgcattagagctgcttaatgaggtcggaatcgaaggtttaacaacccgtaaactcgcccagaagctaggtgtagagcagcctacattgtattggcatgtaaaaaataagcgagctctgctcgacgcaatggccattgagatgctggataggcacgcgactcactattgccctttagaaggggaaagctggcaagattttttacgtaataacgctaaaagtatgagatgtgctttactaagtcatcgcgatggagcaaaagtatgtttaggtacaggctttacagaacagcaatatgaaactgccgaaaatagtatggcctttttatgccaacaaggtttttcactagagaacgcactgtatgcaatgcaggctgttggtatttatactttaggttgcgtattgttggatcaagagcttcaagtcgctaaagaagaaagggaaacacctactactgatagtatgccgccattagtccgacaagctctggaattaaaggatcaccaaggtgcagagccagccttcttattcggccttgaattgatcatatgcggattagaaaaacaacttaaatgtgaaagtgggtcttaa

SEQ ID NO: 654 - DNA, 627 bp, Artificial Sequence
  Sulfonylurea responsive repressor
atgggatctagattagataaaagtaaagcgattaacagcgcattagagctgcttaatgaggtcggaatcgaaggtttaacaacccgtaaactcgcccagaagctaggtgtagagcagcctacattgtattggcatgtaaaaaataagcgagctctgctcgacgcattggccattgagatgctggataggcacgcgactcactattgccctttagaaggggaaagctggcaagattttttacgtaataacgctaaaagtatgagatgtgctttactaagtcatcgcgatggagcaaaagtatgtttaggtacaggctttacagaaaagcactatgaaactgccgaaaatagtatggcctttttatgccaacaaggtttttcactagagcacgcaatgtatgcaatgcaggctgttggtatttatactttaggttgcgtattgttggatcaagagcttcaagtcgctaaagaagaaagggaaacacctactactgatagtatgccgccattagtccgacaagttctggaattaaaggatcaccaaggtgcagagccagccttcttattcggccttgaattgatcatatgcggattagaaaaacaacttaaatgtgaaagtgggtcttaa

SEQ ID NO: 655 - DNA, 627 bp, Artificial Sequence
  Sulfonylurea responsive repressor
atgggatctagattagataaaagtaaagygattaacagcgcattagagctgcttaatgaggtcggaatcgaaggtttaacaacccgtaaactcgcccagaagctaggtgtagagcagcctacattgtattggcatgtaaaaaataagcgagctctgctcgacgcattggccattgagatgctggataggcacgcgactcactattgccctttagaaggggaaagctggcaagattttttacgtaataacgctaaaagtatgagatgtgctttactaagtcatcgcgatggagcaaaagtatgtttaggtacaggctttacagaaaagcaatatgaagctgccgaaaatagtatggcctttttatgccaacaaggtttttcactagagcacgcaatgtatgcaatgcaggctgctggtatttatactttaggttgcgtattgttggatcaagagcttcaagtcgctaaagaagaaagggaaacacctactactgatagtatgccgccattagtccgacaagttctggaattaaaggatcaccaaggtgcagagccagccttcttattcggccttgaattgatcatatgcggattagaaaaacaacttaaatgtgaaagtgggtcttaa

SEQ ID NO: 656 - DNA, 627 bp, Artificial Sequence
  Sulfonylurea responsive repressor
atgggatctagattagataaaagtaaagygattaacagcgcattagagctgcttaatgaggtcggaatcgaaggtttaacaacccgtaaactcgcccagaagctaggtgtagagcagcctacattgtattggcatgtaaaaaataagcgagctctgctcgacgcaatggccattgagatgctggataggcacgcgactcactattgccctttagaaggggaaagctggcaagattttttacgtaataacgctaaaagtatgagatgtgctttactaagtcatcgcgatggagcaaaagtatgtttaggtacaggctttacagaacagcaatatgaaactgccgaaaatagtatggcctttttatgccaacaaggtttttcactagagaacgcaatgtatgcaatgcaggctgcttgtatttatactttaggttgcgtattgttggatcaagagcttcaagtcgctaaagaagaaagggaaacacctactactgatagtatgccgccattagtccgacaagttctggaattaaaggatcaccaaggtgcagagccagccttcttattcggccttgaattgatcatatgcggattagaaaaacaacttaaatgtgaaagtgggtcttaa

SEQ ID NO: 657 - DNA, 627 bp, Artificial Sequence
  Sulfonylurea responsive repressor
atgggatctagattagataaaagtaaagygattaacagcgcattagagctgcttaatgaggtcggaatcgaaggtttaacaacccgtaaactcgcccagaagctaggtgtagagcagcctacattgtattggcatgtaaaaaataagcgagctctgctcgacgcaatggccattgagatgctggataggcacgcgactcactattgccctttagaaggggaaagctggcaagattttttacgtaataacgctaaaagtatgagatgtgctttactaagtcatcgcgatggagcaaaagtatgtttaggtacaggctttacagaacagcaatatgaaactgccgaaaatagtctggcctttttatgccaacaaggtttttcactagagcacgcactgtatgcaatgcaggctgctggtatttttactttaggttgcgtattgttggatcaagagcttcaagtcgctaaagaagaaagggaaacacctactactgatagtatgccgccattagtccgacaagctctggaattaaaggatcaccaaggtgcagagccagccttcttattcggccttgaattgatcatatgcggattagaaaaacaacttaaatgtgaaagtgggtcttaa

SEQ ID NO: 658 - DNA, 627 bp, Artificial Sequence
  Sulfonylurea responsive repressor
atgggatctagattagataaaagtaaagygattaacagcgcattagagctgcttaatgaggtcggaatcgaaggtttaacaacccgtaaactcgcccagaagctaggtgtagagcagcctacattgtattggcatgtaaaaaataagcgagctctgctcgacgcaatggccattgagatgctggataggcacgcgactcacgtgtgccctttagaaggggaaagctggcaagattttttacgtaataacgctaaaagtatgagatgtgctttactaagtcatcgcgatggagcaaaagtatgtttaggtacaggctttacagaacagcaatatgaaggtgccgaaaatagtatggcctttttatgccaacaaggtttttcactagagcacgcaatgtatgcaatgcaggctgttggtatttatactttaggttgcgtattgttggatcaagagcttcaagtcgctaaagaagaaagggaaacacctactactgatagtatgccgccattagtccgacaagctctggaattaaaggatcaccaaggtgcagagccagccttcttattcggccttgaattgatcatatgcggattagaaaaacaacttaaatgtggaagtgggtcttaa

SEQ ID NO: 659 - DNA, 627 bp, Artificial Sequence
  Sulfonylurea responsive repressor
atgggatctagattagataaaagtaaagtgattaacagcgcattagagctgcttaatgaggtcggaatcgaaggtttaacaacccgtaaactcgcccagaagctaggtgtagagcagcctacattgtattggcatgtaaaaaataagcgagctctgctcgacgcattggccattgagatgctggataggcacgcgactcacatctgccctttagaaggggaaagctggcaagattttttacgtaataacgctaaaagtatgagatgtgctttactaagtcatcgcgatggagcaaaagtatgtttaggtacaggctttacagaacagatgtatgaaactgccgaaaatagtatggcctttttatgccaacaaggtttttcactagagaacgcaatgtatgcaatgcaggctgctggtatttttactttaggttgcgtattgttggatcaagagcttcaagtcgctaaagaagaaagggaaacacctactactgatagtatgccgccattagtccgacaagttctggaattaaaggatcaccaaggtgcagagccagccttcttattcggccttgaattgatcatatgcggattagaaaaacaacttaaatgtgaaagtgggtcttaa

SEQ ID NO: 660 - DNA, 627 bp, Artificial Sequence
  Sulfonylurea responsive repressor
atgggatctagattagataaaagtaaagygattaacagcgcattagagctgcttaatgaggtcggaatcgaaggtttaacaacccgtaaactcgcccagaagctaggtgtagagcagcctacattgtattggcatgtaaaaaataagcgagctctgctcgacgcattggccattgagatgctggataggcacgcgactcactattgccctttagaaggggaaagctggcaagattttttacgtaataacgctaaaagtatgagatgtgctttactaagtcatcgcgatggagcaaaagtatgtttaggtacaggctttacagaacagatgtatgaaagtgccgaaaatagtctggcctttttatgccaacaaggtttttcactagagcacgcaatgtatgcaatgcaggctgctggtatttttactttaggttgcgtattgttggatcaagagcttcaagtcgctaaagaagaaagggaaacacctactactgatagtatgccgccattagtccgacaagttctggaattaaaggatcaccaaggtgcagagccagccttcttattcggccttgaattgatcatatgcggattagaaaaacaacttaaatgtgaaagtgggtcttaa

SEQ ID NO: 661 - DNA, 627 bp, Artificial Sequence
  Sulfonylurea responsive repressor
  misc_feature 595: n = A,T,C or G
atgggatctagattagataaaagtaaagtgattaacagcgcattagagctgcttaatgaggtcggaatcgaaggtttaacaacccgtaaactcgcccagaagctaggtgtagagcagcctacattgtattggcatgtaaaaaataagcgagctctgctcgacgcaatggccattgagatgctggataggcacgcgactcactattgccctttagaaggggaaagctggcaagattttttacgtaataacgctaaaagtatgagatgtgctttactaagtcatcgcgatggagcaaaagtatgtttaggtacaggctttacagaacagcactatgaaagtgccgaaaatagtatggcctttttatgccaacaaggtttttcactagagcacgcaatgtatgcaatgcaggctgctggtatttatactttaggttgcgtattgttggatcaagagcttcaagtcgctaaagaagaaaggcaaacacctactactgatagtatgccgccattagtccgacaagctctggaattaaaggatcaccaaggtgcagagccagccttcttattcggccttgaattgatcatatgcggattanaaaaacaacttaaatgtgaaagtgggtcttaa

SEQ ID NO: 662 - DNA, 627 bp, Artificial Sequence
  Sulfonylurea responsive repressor
atgggatctagattagataaaagtaaagygattaacagcgcattagagctgcttaatgaggtcggaatcgaaggtttaacaacccgtaaactcgcccagaagctaggtgtagagcagcctacattgtattggcatgtaaaaaataagcgagctctgctcgacgcaatggccattgagatgctggataggcacgcgactcacttgtgccctttagaaggggaaagctggcaagattttttacgtaataacgctaaaagtatgagatgtgctttactaagtcatcgcgatggagcaaaagtatgtttaggtacaggctttacagaacagcaatatgaaactgccgaaaatagtatggcctttttatgccaacaaggtttttcactagagcacgcaatgtatgcaatgcaggctgttggtatttatactttaggttgcgtattgttggatcaagagcttcaagtcgctaaagaagaaagggaaacacctactactgatagtatgccgccattactccgacaagctctggaattaaaggatcaccaaggtgcagagccagccttcttattcggccttgaattgatcatatgcggattagaaaaacaacttaaatgtgaaagtgggtcttaa

SEQ ID NO: 663 - DNA, 627 bp, Artificial Sequence
  Sulfonylurea responsive repressor
  misc_feature 166, 330: n = A,T,C or G
atgggatctagattagataaaagtaaagtgattaacagcgcattagagctgcttaatgaggtcggaatcgaaggtttaacaacccgtaaactcgcccagaagctaggtgtagagcagcctacattgtattggcatgtaaaaaataagcgagctctgctcgacgcantggccattgagatgctggataggcacgcgactcactattgccctttagaaggggaaagctggcaagattttttacgtaataacgctaaaagtatgagatgtgctttactaagtcatcgcgatggagcaaaagtatgtttaggtacaggctttacagaacagcantatgaagctgccgaaaatagtatggcctttttatgccaacaaggtttttcactagagcacgcaatgtatgcaatgcaggctgctggtatttatactttaggttgcgtattgttggatcaagagcttcaagtcgctaaagaagaaagggaaacacctactactgatagtatgccgccattagtccgacaagttctggaattaaaggatcaccaaggtgcagagccagccttcttattcggccttgaattgatcatatgcggattagaaaaacaacttaaatgtgaaagtgggtcttaa

SEQ ID NO: 664 - DNA, 627 bp, Artificial Sequence
  Sulfonylurea responsive repressor
  misc_feature 511: n = A,T,C or G
atgggatctagattagataaaagtaaagtgattaacagcgcattagagctgcttaatgaggtcggaatcgaaggtttaacaacccgtaaactcgcccagaagctaggtgtagagcagcctacattgtattggcatgtaaaaaataagcgagctctgctcgacgcaatggccattgagatgctggataggcacgcgactcactattgccctttagaaggggaaagctggcaagattttttacgtaataacgctaaaagtatgagatgtgctttactaagtcatcgcgatggagcaaaagtatgtttaggtacaggctttacagaacagcaatatgaaactgccgaaaatagtatggcctttttatgccaacaaggtttttcactagagcacgcactgtatgcaatgcaggctgctggtatttatactttaggttgcgtattgttggatcaagagcttcaagtcgctaaagaagaaagggaaacacctactactgatagtatgccgccattantccgacaagttctggaattaaaggatcaccaaggtgcagagccagccttcttattcggccttgaattgatcatatgcggattagaaaaacaacttaaatgtgaaagtgggtcttaa

SEQ ID NO: 665 - DNA, 627 bp, Artificial Sequence
  Sulfonylurea responsive repressor
atgggatctagattagataaaagtaaagygattaacagcgcattagagctgcttaatgaggtcggaatcgaaggtttaacaacccgtaaactcgcccagaagctaggtgtagagcagcctacattgtattggcatgtaaaaaataagcgagctctgctcgacgcaatggccattgagatgctggataggcacgcgactcactattgccctttagaaggggaaagctggcaagattttttacgtaataacgctaaaagtatgagatgtgctttactaagtcatcgcgatggagcaaaagtatgtttaggtacaggctttacagaacagcaatatgaaactgccgaaaatagtctggcctttttatgccaacaaggtttttcactagagcacgcaatgtatgcaatgcaggctgttggtatttttactttaggttgcgtattgttggatcaagagcttcaagtcgctaaagaagaaagggaaacacctactactgatagtatgccgccattagtccgacaagttctggaattaaaggatcaccaaggtgcagagccagccttcttattcggccttgaattgatcatatgcggattagaaaaacaacttaaatgtgaaagtgggtcttaa

SEQ ID NO: 666 - DNA, 627 bp, Artificial Sequence
  Sulfonylurea responsive repressor
atgggatctagattagataaaagtaaagtgattaacagcgcattagagctgcttaatgaggtcggaatcgaaggtttaacaacccgtaaactcgcccagaagctaggtgtagagcagcctacattgtattggcatgtaaaaaataagcgagctctgctcgacgcaatggccattgagatgctggataggcacgcgactcactattgccctttagaaggagaaagctggcaagattttttacgtaataacgctaaaagtatgagatgtgctttactaagtcatcgcgatggagcaaaagtatgtttaggtacaggctttacagaacagcaatatgaaactgccgaaaatagtctggcctttttatgccaacaaggtttttcactagagaacgcactgtatgcaatgcaggctgttggtatttatactttaggttgcgtattgttggatcaagagcttcaagtcgctaaagaagaaagggaaacacctactactgatagtatgccgccattagtccgacaagctctggaattaaaggatcaccaaggtgcagagccagccttcttattcggccttgaattgatcatatgcggattagaaaaacaacttaaatgtgaaagtgggtcttaa

SEQ ID NO: 667 - DNA, 627 bp, Artificial Sequence
  Sulfonylurea responsive repressor
atgggatctagattagataaaagtaaagtgattaacagcgcattagagctgcttaatgaggtcggaatcgaaggtttaacaacccgtaaactcgcccagaagctaggtgtagagcagcctacattgtattggcatgtaaaaaataagcgagctctgctcgacgcaatggccattgagatgctggataggcacgcgactcactattgccctttagaaggggaaagctggcaagattttttacgtaataacgctaaaagtatgagatgtgctttactaagtcatcgcgatggagcaaaagtatgtttaggtacaggctttacagaacagcactatgaaactgccgaaaatagtctggcctttttatgccaacaaggtttttcactagagcacgcaatgtatgcaatgcaggctgttggtatttatactttaggttgcgtattgttggatcaagagcttcaagtcgctaaagaagaaagggaaacacctactactgatagtatgccgccattagtccgacaagctctggaattaaaggatcaccaaggtgcagagccagccttcttattcggccttgaattgatcatatgcggattagaaaaacaacttaaatgtgaaagtgggtcttaa

SEQ ID NO: 668 - DNA, 627 bp, Artificial Sequence
  Sulfonylurea responsive repressor
atgggatctagattagataaaagtaaagygattaacagcgcattagagctgcttaatgaggtcggaatcgaaggtttaacaacccgtaaactcgcccagaagctaggtgtagagcagcctacattgtattggcatgtaaaaaataagcgagctctgctcgacgcaatggccattgagatgctggataggcacgcgactcactattgccctttagaagaggaaagctggcaagattttttacgtaataacgctaaaagtatgagatgtgctttactaagtcatcgcgatggagcaaaagtatgtttaggtacaggctttacagaacagcaatatgaagctgccgaaaatagtatggcctttttatgccaacaaggtttttcactagagcacgcactgtatgcaatgcaggctgctggtatttatactttaggttgcgtattgttggatcaagagcttcaagtcgctaaagaagaaagggaaacacctactactgatagtatgccgccattagtccgacaagctctggaattaaaggatcaccaaggtgcagagccagccttcttattcggccttgaattgatcatatgcggattagaaaaacaacttaaatgtgaaagtgggtcttaa

SEQ ID NO: 669 - DNA, 627 bp, Artificial Sequence
  Sulfonylurea responsive repressor
atgggatctagattagataaaagtaaagtgattaacagcgcattagagctgcttaatgaggtcggaatcgaaggtttaacaacccgtaaactcgcccagaagctaggtgtagagcagcctacattgtattggcatgtaaaaaataagcgagctctgctcgacgcaatggccattgagatgctggataggcacgcgactcactattgccctttagaaggggaaagctggcaagattttttacgtaataacgctaaaagtatgagatgtgctttactaagtcatcgcgatggagcaaaagtatgtttaggtacaggctttacagaacagcaatatgaaactgccgaaaatagtctggcctttttatgccaacaaggtttttcactagagaacgcaatgtatgcaatgcaggctgctggtatttatactttaggttgcgtattgttggatcaagagcttcaagtcgctaaagaagaaagggaaacacctactactgatagtatgccgccattagtccgacaaggtctggaattaaaggatcaccaaggtgcagagccagccttcttattcggtcttgaattgatcatatgcggattagaaaaacaacttaaatgtgaaagtgggtcttaa

SEQ ID NO: 670 - DNA, 627 bp, Artificial Sequence
  Sulfonylurea responsive repressor
atgggatctagattagataaaagtaaagcgattaacagcgcattagagctgcttaatgaggtcggaatcgaaggtttaacaacccgtaaactcgcccagaagctaggtgtagagcagcctacattgtattggcatgtaaaaaataagcgagctctgctcgacgcattggccattgagatgctggataggcacgcgactcactattgccctttagaaggggaaagctggcaagattttttacgtaataacgctaaaagtatgagatgtgctttactaagtcatcgcgatggagcaaaagtatgtttaggtacaggctttacagaacagcactatgaaactgccgaaaatagtctggcctttttatgccaacaaggtttttcactagagaacgcaatgtatgcaatgcaggctgttggtatttttactttaggttgcgtattgttggatcaagagcttcaagtcgctaaagaagaaagggaaacacctactactgatagtatgccgccattagtccgacaagttctggaattaaaggatcaccaaggtgcagagccagccttcttattcggccttgaattgatcatatgcggattagaaaaacaacttaaatgtgaaagtgggtcttaa

SEQ ID NO: 671 - DNA, 627 bp, Artificial Sequence
  Sulfonylurea responsive repressor
atgggatctagattagataaaagtaaagtgattaacagcgcattagagctgcttaatgaggtcggaatcgaaggtttaacaacccgtaaactcgcccagaagctaggtgtagagcagcctacattgtattggcatgtaaaaaataagcgagctctgctcgacgcaatggccattgagatgctggataggcacgcgactcactattgccctttagaaggggaaagctggcaagattttttacgtaataacgctaaaagtatgagatgtgctttactaagtcatcgcgatggagcaaaagtatgtttaggtacaggctttacagaacagcaatatgaaagtgccgaaaatagtctggcctttttatgccaacaaggtttttcactagagaacgcaatgtatgcaatgcaggctgctggtatttatactttaggttgcgtattgttggatcaagagcttcaagtcgctaaagaagaaagggaaacacctactactgatagtatgccgccattactccgacaagctctggaattaaaggatcaccaaggtgcagagccagccttcttattcggccttgaattgatcatatgcggattagaaaaacaacttaaatgtgaaagtgggtcttaa

SEQ ID NO: 672 - DNA, 627 bp, Artificial Sequence
  Sulfonylurea responsive repressor
atgggatctagattagataaaagtaaagygattaacagcgcattagagctgcttaatgaggtcggaatcgaaggtttaacaacccgtaaactcgcccagaagctaggtgtagagcagcctacattgtattggcatgtaaaaaataagcgagctctgctcgacgcaatggccattgagatgctggataggcacgcgactcactattgccctttagaaggggaaagctggcaagattttttacgtaataacgctaaaagtatgagatgtgctttactaagtcaacgcgatggagcaaaagtatgtttaggtacaggctttacagaacagcaatatgaaggtgccgaaaatagtctggcctttttatgccaacaaggtttttcactagagcacgcactgtatgcaatgcaggctgctggtatttttactttaggttgcgtattgttggatcaagagcttcaagtcgctaaagaagaaagggaaacacctactactgatagtatgccgccattagtccgacaagctctggaattaaaggatcaccaaggtgcagagccagccttcttattcggccttgaattgatcatatgcggattagaaaaacaacttaaatgtgaaagtgggtcttaa

SEQ ID NO: 673 - DNA, 627 bp, Artificial Sequence
  Sulfonylurea responsive repressor
atgggatctagattagataaaagtaaagtgattaacagcgcattagagctgcttaatgaggtcggaatcgaaggtttaacaacccgtaaactcgcccagaagctaggtgtagagcagcctacattgtattggcatgtaaaaaataagcgagctctgctcgacgcaatggccattgagatgctggataggcacgcgactcactattgccctttagaaggggaaagctggcaagattttttacgtaataacgctaaaagtatgagatgtgctttactaagtcatcgcgatggagcaaaagtatgtttaggtacaggctttacagaacagcaatatgaaactgccgaaaatagtatggcctttttatgccaacaaggtttttcactagagaacgcactgtatgcaatgcaggctgctggtatttatactttaggttgcgtattgttggatcaagagcttcaagtcgctaaagaagaaagggaaacacctactactgatagtatgccgccattagtccgacaaggtctggaattaaaggatcaccaaggtgcagagccagccttcttattcggccttgaattgatcatatgcggattagaaaaacaacttaaatgtgaaagtgggtcttaa

SEQ ID NO: 674 - DNA, 627 bp, Artificial Sequence
  Sulfonylurea responsive repressor
atgggatctagattagataaaagtaaagtgattaacagcgcattagagctgcttaatgaggtcggaatcgaaggtttaacaacccgtaaactcgcccagaagctaggtgtagagcagcctacattgtattggcatgtaaaaaataagcgagctctgctcgacgcattggccattgagatgctggataggcacgcgactcactattgccctttagaaggggaaagctggcaagattttttacgtaataacgctaaaagtatgagatgtgctttactaagtcatcgcgatggagcaaaagtatgtttaggtacaggctttacagaacagatgtatgaaagtgccgaaaatagtatggcctttttatgccaacaaggtttttcactagagaacgcaatgtatgcaatgcaggctgctggtatttatactttaggttgcgtattgttggatcaagagcttcaagtcgctaaagaagaaagggaaacacctactactgatagtatgccgccattagtccgacaaggtctggaattaaaggatcaccaaggtgcagagccagccttcttattcggccttgaattgatcatatgcggattagaaaaacaacttaaatgtgaaagtgggtcttaa

SEQ ID NO: 675 - DNA, 627 bp, Artificial Sequence
  Sulfonylurea responsive repressor
atgggatctagattagataaaagtaaagtgattaacagcgcattagagctgcttaatgaggtcggaatcgaaggtttaacaacccgtaaactcgcccagaagctaggtgtagagcagcctacattgtattggcatgtaaaaaataagcgagctctgctcgacgcaatggccattgagatgctggataggcacgcgactcactattgccctttagaaggggaaagctggcaagattttttacgtaataacgctaaaagtatgagatgtgctttactaagtcatcgcgatggagcaaaagtatgtttaggtacaggctttacagaacagcaatatgaaggtgccgaaaatagtatggcctttttatgccaacaaggtttttcactagagaacgcaatgtatgcaatgcaggctgttggtatttttactttaggttgcgtattgttggatcaagagcttcaagtcgctaaagaagaaagggaaacacctactactgatagtatgccgccattagtccgacaagctctggaattaaaggatcaccaaggtgcagagccagccttcttattcggccttgaattgatcatatgcggattagaaaaacaacttaaatgtgaaagtgggtcttaa

SEQ ID NO: 676 - DNA, 627 bp, Artificial Sequence
  Sulfonylurea responsive repressor
  misc_feature 203, 204, 330, 337, 338, 394: n = A,T,C or G
atgggatctagattagataaaagtaaagtgattaacagcgcattagagctgcttaatgaggtcggaatcgaaggtttaacaacccgtaaactcgcccagaagctaggtgtagagcagcctacattgtattggcatgtaaaaaataagcgagctctgctcgacgcattggccattgagatgctggataggcacgcgactcactnntgccctttagaaggggaaagctggcaagattttttacgtaataacgctaaaagtatgagatgtgctttactaagtcatcgcgatggagcaaaagtatgtttaggtacaggctttacagaacagcantatgaanntgccgaaaatagtatggcctttttatgccaacaaggtttttcactagagcacgcantgtatgcaatgcaggctgctggtatttttactttaggttgcgtattgttggatcaagagcttcaagtcgctaaagaagaaagggaaacacctactactgatagtatgccgccattactccgacaagctctggaattaaaggatcaccaaggtgcagagccagccttcttattcggccttgaattgatcatatgcggattagaaaaacaacttaaatgtgaaagtgggtcttaa

SEQ ID NO: 677 - DNA, 627 bp, Artificial Sequence
  Sulfonylurea responsive repressor
atgggatctagattagataaaagtaaagtgattaacagcgcattagagctgcttaatgaggtcggaatcgaaggtttaacaacccgtaaactcgcccagaagctaggtgtagagcagcctacattgtattggcatgtaaaaaataagcgagctctgctcgacgcaatggccattgagatgctggataggcacgcgactcacatctgccctttagaaggggaaagctggcaagattttttacgtaataacgctaaaagtatgagatgtgctttactaagtcatcgcgatggagcaaaagtatgtttaggtacaggctttacagaacagcaatatgaaactgccgaaaatagtctggcctttttatgccaacaaggtttttcactagagaacgcactgtatgcaatgcaggctgctggtatttttactttaggttgcgtattgttggatcaagagcttcaagtcgctaaagaagaaagggaaacacctactactgatagtatgccgccattagtccgacaagttctggaattaaaggatcaccaaggtgcagagccagccttcttattcggccttgaattgatcatatgcggattagaaaaacaacttaaatgtgaaagtgggtcttaa

SEQ ID NO: 678 - DNA, 627 bp, Artificial Sequence
  Sulfonylurea responsive repressor
  misc_feature 203, 204, 337, 388, 415, 512, 521: n = A,T,C or G
atgggatctagattagataaaagtaaagtgattaacagcgcattagagctgcttaatgaggtcggaatcgaaggtttaacaacccgtaaactcgcccagaagctaggtgtagagcagcctacattgtattggcatgtaaaaaataagcgagctctgctcgacgcattggccattgagatgctggataggcacgcgactcactnntgccctttagaaggggaaagctggcaagattttttacgtaataacgctaaaagtatgagatgtgctttactaagtcatcgcgatggagcaaaagtatgtttaggtacaggctttacagaacagctgtatgaanctgccgaaaatagtctggcctttttatgccaacaaggtttttcactagagnacgcactgtatgcaatgcaggctgctngtatttatactttaggttgcgtattgttggatcaagagcttcaagtcgctaaagaagaaagggaaacacctactactgatagtatgccgccattagnccgacaagntctggaattaaaggatcaccaaggtgcagagccagccttcttattcggccttgaattgatcatatgcggattagaaaaacaacttaaatgtgaaagtgggtcttaa

SEQ ID NO: 679 - DNA, 627 bp, Artificial Sequence
  Sulfonylurea responsive repressor
atgggatctagattagataaaagtaaagtgattaacagcgcattagagctgcttaatgaggtcggaatcgaaggtttaacaacccgtaaactcgcccagaagctaggtgtagagcagcctacattgtattggcatgtaaaaaataagcgagctctgctcgacgcattggccattgagatgctggataggcacgcgactcactattgccctttagaaggggaaagctggcaagattttttacgtaataacgctaaaagtatgagatgtgctttactaagtcatcgcgatggagcaaaagtatgtttaggtacaggctttacagaaaagcaatatgaaagtgccgaaaatagtctggcctttttatgccaacaaggtttttcactagagcacgcaatgtatgcaatgcaggctgctggtatttatactttaggttgcgtattgttggatcaagagcttcaagtcgctaaagaagaaagggaaacacctactactgatagtatgccgccattagtccgacaagctctggaattaaaggatcaccaaggtgcagagccagccttcttattcggccttgaattgatcatatgcggattagaaaaacaacttaaatgtgaaagtgggtcttaa

SEQ ID NO: 680 - DNA, 627 bp, Artificial Sequence
  Sulfonylurea responsive repressor
  misc_feature 511: n = A,T,C or G
atgggatctagattagataaaagtaaagtgattaacagcgcattagagctgcttaatgaggtcggaatcgaaggtttaacaacccgtaaactcgcccagaagctaggtgtagagcagcctacattgtattggcatgtaaaaaataagcgagctctgctcgacgcaatggccattgagatgctggataggcacgcgactcactattgccctttagaaggggaaagctggcaagattttttacgtaataacgctaaaagtatgagatgtgctttactaagtcatcgcgatggagcaaaagtatgtttaggtacaggctttacagaacagcaatatgaaagtgccgaaaatagtatggcctttttatgccaacaaggtttttcactagagcacgcaatgtatgcaatgcaggctgctggtatttatactttaggttgcgtattgttggatcaagagcttcaagtcgctaaagaagaaagggaaacacctactactgatagtatgccgccattantccgacaagttctggaattaaaggatcaccaaggtgcagagccagccttcttattcggccttgaattgatcatatgcggattagaaaaacaacttaaatgtgaaagtgggtcttaa

SEQ ID NO: 681 - DNA, 627 bp, Artificial Sequence
  Sulfonylurea responsive repressor
  misc_feature 166, 352, 415: n = A,T,C or G
atgggatctagattagataaaagtaaagtgattaacagcgcattagagctgcttaatgaggtcggaatcgaaggtttaacaacccgtaaactcgcccagaagctaggtgtagagcagcctacattgtattggcatgtaaaaaataagcgagctctgctcgacgcantggccattgagatgctggataggcacgcgactcactattgccctttagaaggggaaagctggcaagattttttacgtaataacgctaaaagtatgagatgtgctttactaagtcatcgcgatggagcaaaagtatgtttaggtacaggctttacagaacagatgtatgaaactgccgaaaatagtntggcctttttatgccaacaaggtttttcactagagcacgcaatgtatgcaatgcaggctgctngtatttatactttaggttgcgtattgttggatcaagagcttcaagtcgctaaagaagaaagggaaacacctactactgatagtatgccgccattagctcgacaaggtctggaattaaaggatcaccaaggtgcagagccagccttcttattcggccttgaattgatcatatgcggattagaaaaacaacttaaatgtgaaagtgggtcttaa

SEQ ID NO: 682 - DNA, 627 bp, Artificial Sequence
  Sulfonylurea responsive repressor
  misc_feature 330: n = A,T,C or G
atgggatctagattagataaaagtaaagtgattaacagcgcattagagctgcttaatgaggtcggaatcgaaggtttaacaacccgtaaactcgcccagaagctaggtgtagagcagcctacattgtattggcatgtaaaaaataagcgagctctgctcgacgcaatggccattgagatgctggataggcacgcgactcactattgccctttagaaggggaaagctggcaagattttttacgtaataacgctaaaagtatgagatgtgctttactaagtcatcgcgatggagcaaaagtatgtttaggtacaggctttacagaacagcantatgaagctgccgaaaatagtatggcctttttatgccaacaaggtttttcactagagcacgcaatgtatgcaatgcaagctgctggtatttttactttaggttgcgtattgttggatcaagagcttcaagtcgctaaagaagaaagggaaacacctactactgatagtatgccgccattagtccgacaagctctggaattaaaggatcaccaaggtgcagagccagccttcttattcggccttgaattgatcatatgcggattagaaaaacaacttaaatgtgaaagtgggtcttaa

SEQ ID NO: 683 - DNA, 627 bp, Artificial Sequence
  Sulfonylurea responsive repressor
  misc_feature 204: n = A,T,C or G
atgggatctagattagataaaagtaaagtgattaacagcgcattagagctgcttaatgaggtcggaatcgaaggtttaacaacccgtaaactcgcccagaagctaggtgtagagcagcctacattgtattggcatgtaaaaaataagcgagctctgctcgacgcaatggccattgagatgctggataggcacgcgactcacatntgccctttagaaggggaaagctggcaagattttttacgtaataacgctaaaagtatgagatgtgctttactaagtcatcgcgatggagcaaaagtatgtttaggtacaggctttacagaacagcaatatgaaggtgccgaaaatagtctggcctttttatgccaacaaggtttttcactagagcacgcaatgtatgcaatgcaggctgttggtatttatactttaggttgcgtattgttggatcaagagcttcaagtcgctaaagaagaaagggaaacacctactactgatagtatgccgccattagtccgacaaggtctggaattaaaggatcaccaaggtgcagagccagccttcttattcggccttgaattgatcatatgcggattagaaaaacaacttaaatgtgaaagtgggtcttaa

SEQ ID NO: 684 - DNA, 627 bp, Artificial Sequence
  Sulfonylurea responsive repressor
  misc_feature 330, 337, 422, 595: n = A,T,C or G
atgggatctagattagataaaagtaaagtgattaacagcgcattagagctgcttaatgaggtcggaatcgaaggtttaacaacccgtaaactcgcccagaagctaggtgtagagcagcctacattgtattggcatgtaaaaaataagcgagctctgctcgacgcaatggccattgagatgctggataggcacgcgactcactattgccctttagaaggggaaagctggcaagattttttacgtaataacgctaaaagtatgagatgtgctttactaagtcatcgcgatggagcaaaagtatgtttaggtacaggctttacagaacagcantatgaanctgccgaaaatagtctggcctttttatgccaacaaggtttttcactagagcacgcaatgtatgcaatgcaggctgctggtatttntactttaggttgcgtattgttggatcaagagcttcaagtcgctaaagaagaaagggaaacacctactactgatagtatgccgccattagctcgacaaggtctggaattaaaggatcaccaaggtgcagagccagccttcttattcggccttgaattgatcatatgcggattanaaaaacaacttaaatgtgaaagtgggtcttaa

SEQ ID NO: 685 - DNA, 627 bp, Artificial Sequence
  Sulfonylurea responsive repressor
  misc_feature 461, 583, 595: n = A,T,C or G
atgggatctagattagataaaagtaaagtgattaacagcgcattagagctgcttaatgaggtcggaatcgaaggtttaacaacccgtaaactcgcccagaagctaggtgtagagcagcctacattgtattggcatgtaaaaaataagcgagctctgctcgacgcaatggccattgagatgctggataggcacgcgactcactattgccctttagaaggggaaagctggcaagattttttacgtaataacgctaaaagtatgagatgtgctttactaagtcatcgcgatggagcaaaagtatgtttaggtacaggctttacagaacagcaatatgaaagtgccgaaaatagtatggcctttttatgccaacaaggtttttcactagagcacgcaatgtatgcaatgcaggctgctggtatttatactttaggttgcgtattgttggatcaagagcttcaagncgctaaagaagaaagggaaacacctactactgatagtatgccgccattactccgacaagttctggaattaaatgatcaccaaggtgcagagccagccttcttattcggccttgaattgatcntatgcggattanaaaaacaacttaaatgtgaaagtgggtcttaa

SEQ ID NO: 686 - DNA, 627 bp, Artificial Sequence
  Sulfonylurea responsive repressor
  misc_feature 279, 417, 461, 481, 498, 518, 522, 556, 583, 600, 603: n = A,T,C or G
atgggatctagattagataaaagtaaagtgattaacagcgcattagagctgcttaatgaggtcggaatcgaaggtttaacaacccgtaaactcgcccagaagctaggtgtagagcagcctacattgtattggcatgtaaaaaataagcgagctctgctcgacgcaatggccattgagatgctggataggcacgcgactcactattgccctttagaaggggaaagctggcaagattttttacgtaataacgctaaaagtatgagatgtgctttactaagncatcgcgatggagcaaaagtatgtttaggtacaggctttacagaacagcaatatgaaggtgccgaaaatagtctggcctttttatgccaacaaggtttttcactagagcacgcaatgtatgcaatgcaggctgctggnatttatactttaggttgcgtattgttggatcaagagcttcaagncgctaaagaagaaagggaancccctactactgatagnatgccgccattagctcgacnaggnctggaattaaaggatcaccaaggtccagagccanccttcttattcggccttgaattgatcntatgcggattagaaaancancttaaatgtgaaagtgggtcttaa

SEQ ID NO: 687 - DNA, 627 bp, Artificial Sequence
  Sulfonylurea responsive repressor
atgggatctagattagataaaagtaaagtgattaacagcgcattagagctgcttaatgaggtcggaatcgaaggtttaacaacccgtaaactcgcccagaagctaggtgtagagcagcctacattgtattggcatgtaaaaaataagcgagctctgctcgacgcaatggccattgagatgctggataggcacgcgactcacgtgtgccctttagaaggggaaagctggcaagattttttacgtaataacgctaaaagtatgagatgtgctttactaagtcatcgcgatggagcaaaagtatgtttaggtacaggctttacagaacagcaatatgaaggtgccgaaaatagtatggcctttttatgccaacaaggtttttcactagagcacgcaatgtatgcaatgcaggctgttggtatttatactttaggttgcgtattgttggatcaagagcttcaagtcgctaaagaagaaagggaaacacctactactgatagtatgccgccattagtccgacaagctctggaattaaaggatcaccaaggtgcagagccagccttcttattcggccttgaattgatcatatgcggattagaaaaacaacttaaatgtggaagtgggtcttaa

SEQ ID NO: 688 - DNA, 627 bp, Artificial Sequence
  Sulfonylurea responsive repressor
  misc_feature 166, 203, 325, 328, 329, 330, 352, 388, 415, 422, 513: n = A,T,C or G
atgggatctagattagataaaagtaaagtgattaacagcgcattagagctgcttaatgaggtcggaatcgaaggtttaacaacccgtaaactcgcccagaagctaggtgtagagcagcctacattgtattggcatgtaaaaaataagcgagctctgctcgacgcantggccattgagatgctggataggcacgcgactcactngtgccctttagaaggggaaagctggcaagattttttacgtaataacgctaaaagtatgagatgtgctttactaagtcatcgcgatggagcaaaagtatgtttaggtacaggctttacagaanagnnntatgaaggtgccgaaaatagtntggcctttttatgccaacaaggtttttcactagagnacgcaatgtatgcaatgcaggctgctngtatttntactttaggttgcgtattgttggatcaagagcttcaagtcgctaaagaagaaagggaaacacctactactgatagtatgccgccattagcncgacaagttctggaattaaaggatcaccaaggtgcagagccagccttcttattcggccttgaattgatcatatgcggattagaaaaacaacttaaatgtgaaagtgggtcttaa

SEQ ID NO: 689 - DNA, 627 bp, Artificial Sequence
  Sulfonylurea responsive repressor
  misc_feature 325, 328, 394, 413, 512: n = A,T,C or G
atgggatctagattagataaaagtaaagtgattaacagcgcattagagctgcttaatgaggtcggaatcgaaggtttaacaacccgtaaactcgcccagaagctaggtgtagagcagcctacattgtattggcatgtaaaaaataagcgagctctgctcgacgcaatggccattgagatgctggataggcacgcgactcactattgccctttagaaggggaaagctggcaagattttttacgtaataacgctaaaagtatgagatgtgctttactaagtcatcgcgatggagcaaaagtatgtttaggtacaggctttacagaanagntgtatgaaagtgccgaaaatagtatggcctttttatgccaacaaggtttttcactagagcacgcantgtatgcaatgcaggctgntggtatttatactttaggttgcgtattgttggatcaagagcttcaagtcgctaaagaagaaagggaaacacctactactgatagtatgccgccattagntcgacaagctctggaattaaaggatcaccaaggtgcagagccagccttcttattcggccttgaattgatcatatgcggattagaaaaacaacttaaatgtgaaagtgggtcttaa

SEQ ID NO: 690 - DNA, 627 bp, Artificial Sequence
  Sulfonylurea responsive repressor
atgggatctagattagataaaagtaaagtgattaacagcgcattagagctgcttaatgaggtcggaatcgaaggtttaacaacccgtaaactcgcccagaagctaggtgtagagcagcctacattgtattggcatgtaaaaaataagcgagctctgctcgacgcattggccattgagatgctggataggcacgcgactcactattgccctttagaaggggaaagctggcaagattttttacgtaataacgctaaaagtatgagatgtgctttactaagtcatcgcgatggagcaaaagtatgtttaggtacaggctttacagaaaagcaatatgaaactgccgaaaatagtatggcctttttatgccaacaaggtttttcactagagaacgcactgtatgcaatgcaggctgttggtatttatactttaggttgcgtattgttggatcaagagcttcaagtcgctaaagaagaaagggaaacacctactactgatagtatgccgccattagtccgacaagctctggaattaaaggatcaccaaggtgcagagccagccttcttattcggccttgaattgatcatatgcggattagaaaaacaacttaaatgtgaaagtgggtcttaa

SEQ ID NO: 691 - DNA, 627 bp, Artificial Sequence
  Sulfonylurea responsive repressor
atgggatctagattagataaaagtaaagtgattaacagcgcattagagctgcttaatgaggtcggaatcgaaggtttaacaacccgtaaactcgcccagaagctaggtgtagagcagcctacattgtattggcatgtaaaaaataagcgagctctgctcgacgcattggccattgagatgctggataggcacgcgactcactattgccctttagaaggggaaagctggcaagattttttacgtaataacgctaaaagtatgagatgtgctttactaagtcatcgcgatggagcaaaagtatgtttaggtacaggctttacagaacagatgtatgaaactgccgaaaatagtctggcctttttatgccaacaaggtttttcactagagcacgcaatgtatgcaatgcaggctgctggtatttttactttaggttgcgtattgttggatcaagagcttcaagtcgctaaagaagaaagggaaacacctactactgatagtatgccgccattagtccgacaagttctggaattaaaggatcaccaaggtgcagagccagccttcttattcggccttgaattgatcatatgcggattagaaaaacaacttaaatgtgaaagtgggtcttaa

SEQ ID NO: 692 - DNA, 627 bp, Artificial Sequence
  Sulfonylurea responsive repressor
  misc_feature 325: n = A,T,C or G
atgggatctagattagataaaagtaaagtgattaacagcgcattagagctgcttaatgaggtcggaatcgaaggtttaacaacccgtaaactcgcccagaagctaggtgtagagcagcctacattgtattggcatgtaaaaaataagcgagctctgctcgacgcaatggccattgagatgctggataggcacgcgactcactattgccctttagaaggggaaagctggcaagattttttacgtaataacgctaaaagtatgagatgtgctttactaagtcatcgcgatggagcaaaagtatgtttaggtacaggctttacagaanagctgtatgaaagtgccgaaaatagtctggcctttttatgccaacaaggtttttcactagagcacgcaatgtatgcaatgcaggctgttggtatttatactttaggttgcgtattgttggatcaagagcttcaagtcgctaaagaagaaagggaaacacctactactgatagtatgccgccattagtccgacaagttctggaattaaaggatcaccaaggtgcagagccagccttcttattcggccttgaattgatcatatgcggattagaaaaacaacttaaatgtgaaagtgggtcttaa

SEQ ID NO: 693 - DNA, 627 bp, Artificial Sequence
  Sulfonylurea responsive repressor
atgggatctagattagataaaagtaaagtgattaacagcgcattagagctgcttaatgaggtcggaatcgaaggtttaacaacccgtaaactcgcccagaagctaggtgtagagcagcctacattgtattggcatgtaaaaaataagcgagctctgctcgacgcattggccattgagatgctggataggcacgcgactcactattgccctttagaaggggaaagctggcaagattttttacgtaataacgctaaaagtatgagatgtgctttactaagtcatcgcgatggagcaaaagtatgtttaggtacaggctttacagaacagatgtatgaaactgccgaaaatagtatggcctttttatgccaacaaggtttttcactagagcacgcactgtatgcaatgcaggctgctggtatttttactttaggttgcgtattgttggatcaagagcttcaagtcgctaaagaagaaagggaaacacctactactgatagtatgccgccattagtccgacaagctctggaattaaaggatcaccaaggtgcagagccagccttcttattcggccttgaattgatcatatgcggattagaaaaacaacttaaatgtgaaagtgggtcttaa

SEQ ID NO: 694 - DNA, 627 bp, Artificial Sequence
  Sulfonylurea responsive repressor
atgggatctagattagataaaagtaaagtgattaacagcgcattagagctgcttaatgaggtcggaatcgaaggtttaacaacccgtaaactcgcccagaagctaggtgtagagcagcctacattgtattggcatgtaaaaaataagcgagctctgctcgacgcaatggccattgagatgctggataggcacgcgactcactattgccctttagaaggggaaagctggcaagattttttacgtaataacgctaaaagtatgagatgtgctttactaagtcatcgcgatggagcaaaagtatgtttaggtacaggctttacagaacagatgtatgaaagtgccgaaaatagtctggcctttttatgccaacaaggtttttcactagagaacgcactgtatgcaatgcaggctgttggtatttatactttaggttgcgtattgttggatcaagagcttcaagtcgctaaagaagaaagggaaacacctactactgatagtatgccgccattagtccgacaagttctggaattaaaggatcaccaaggtgcagagccagccttcttattcggccttgaattgatcatatgcggattagaaaaacaacttaaatgtgaaagtgggtcttaa

SEQ ID NO: 695 - DNA, 627 bp, Artificial Sequence
  Sulfonylurea responsive repressor
atgggatctagattagataaaagtaaagtgattaacagcgcattagagctgcttaatgaggtcggaatcgaaggtttaacaacccgtaaactcgcccagaagctaggtgtagagcagcctacattgtattggcatgtaaaaaataagcgagctctgctcgacgcaatggccattgagatgctggataggcacgcgactcacttctgccctttagaaggggaaagctggcaagattttttacgtaataacgctaaaagtatgagatgtactttactaagtcatcgcgatggagcaaaagtatgtttaggtacaggctttacagaacagcaatatgaaagtgccgaaaatagtctggcctttttatgccaacaaggtttttcactagagaacgcaatgtatgcaatgcaggctgttggtatttatactttaggttgcgtattgttggatcaagagcttcaagtcgctaaagaagaaagggaaacacctactactgatagtatgccgccattagtccgacaagctctggaattaaaggatcaccaaggtgcagagccagccttcttattcggccttgaattgatcatatgcggattagaaaaacaacttaaatgtgaaagtgggtcttaa

SEQ ID NO: 696 - DNA, 627 bp, Artificial Sequence
  Sulfonylurea responsive repressor
atgggatctagattagataaaagtaaagtgattaacagcgcattagagctgcttaatgaggtcggaatcgaaggtttaacaacccgtaaactcgcccagaagctaggtgtagagcagcctacattgtattggcatgtaaaaaataagcgagctctgctcgacgcattggccattgagatgctggataggcacgcgactcacatctgccctttagaaggggaaagctggcaagattttttacgtaataacgctaaaagtatgagatgtgctttactaagtcatcgcgatggagcaaaagtatgtttaggtacaggctttacagaacagatgtatgaagctgccgaaaatagtatggcctttttatgccaacaaggtttttcactagagaacgcaatgtatgcaatgcaggctgctggtatttatactttaggttgcgtattgttggatcaagagcttcaagtcgctaaagaagaaagggaaacacctactactgatagtatgccgccattagtccgacaagctctggaattaaaggatcaccaaggtgcagagccagccttcttattcggccttgaattgatcatatgcggattagaaaaacaacttaaatgtgaaagtgggtcttaa

SEQ ID NO: 697 - DNA, 627 bp, Artificial Sequence
  Sulfonylurea responsive repressor
atgggatctagattagataaaagtaaagtgattaacagcgcattagagctgcttaatgaggtcggaatcgaaggtttaacaacccgtaaactcgcccagaagctaggtgtagagcagcctacattgtattggcatgtaaaaaataagcgagctctgctcgacgcaatggccattgagatgctggataggcacgcgactcactattgccctttagaaggggaaagctggcaagattttttacgtaataacgctaaaagtatgagatgtgctttactaagtcatcgcgatggagcaaaagtatgtttaggtacaggctttacagaacagcactatgaaactgccgaaaatagtctggcctttttatgccaacaaggtttttcactagagaacgcaatgtatgcaatgcaggctgctggtatttatactttaggttgcgtattgttggatcaagagcttcaagtcgctaaagaagaaagggaaacacctactactgatagtatgccgccattagtccgacaagttctggaattaaaggatcaccaaggtgcagagccagccttcttattcggccttgaattgatcatatgcggattagaaaaacaacttaaatgtgaaagtgggtcttaa

SEQ ID NO: 698 - DNA, 627 bp, Artificial Sequence
  Sulfonylurea responsive repressor
atgggatctagattagataaaagtaaagtgattaacagcgcattagagctgcttaatgaggtcggaatcgaaggtttaacaacccgtaaactcgcccagaagctaggtgtagagcagcctacattgtattggcatgtaaaaaataagcgagctctgctcgacgcaatggccattgagatgctggataggcacgcgactcacttgtgccctttagaaggggaaagctggcaagattttttacgtaataacgctaaaagtatgagatgtgctttactaagtcatcgcgatggagcaaaagtatgtttaggtacaggctttacagaacagcaatatgaaactgccgaaaatagtatggcctttttatgccaacaaggtttttcactagagcacgcaatgtatgcaatgcaggctgctggtatttatactttaggttgcgtattgttggatcaagagcttcaagtcgctaaagaagaaagggaaacacctactactgatagtatgccgccattagtccgacaaggtctggaattaaaggatcaccaaggtgcagagccagccttcttattcggccttgaattgatcatatgcggattagaaaaacaacttaaatgtgaaagtgggtcttaa

SEQ ID NO: 699 - DNA, 627 bp, Artificial Sequence
  Sulfonylurea responsive repressor
atgggatctagattagataaaagtaaagtgattaacagcgcattagagctgcttaatgaggtcggaatcgaaggtttaacaacccgtaaactcgcccagaagctaggtgtagagcagcctacattgtattggcatgtaaaaaataagcgagctctgctcgacgcattggccattgagatgctggataggcacgcgactcacttctgccctttagaaggggaaagctggcaagattttttacgtaataacgctaaaagtatgagatgtgctttactaagtcatcgcgatggagcaaaagtatgtttaggtacaggctttacagaacagatgtatgaagctgccgaaaatagtatggcctttttatgccaacaaggtttttcactagagcacgcaatgtatgcaatgcaggctgtttgtatttatactttaggttgcgtattgttggatcaagagcttcaagtcgctaaagaagaaagggaaacacctactactgatagtatgccgccattagctcgacaaggtctggaattaaaggatcaccaaggtgcagagccagccttcttattcggccttgaattgatcatatgcggattagaaaaacaacttaaatgtgaaagtgggtcttaa

SEQ ID NO: 700 - DNA, 627 bp, Artificial Sequence
  Sulfonylurea responsive repressor
atgggatctagattagataaaagtaaagtgattaacagcgcattagagctgcttaatgaggtcggaatcgaaggtttaacaacccgtaaactcgcccagaagctaggtgtagagcagcctacattgtattggcatgtaaaaaataagcgagctctgctcgacgcattggccattgagatgctggataggcacgcgactcactattgccctttagaaggggaaagctggcaagattttttacgtaataacgctaaaagtatgagatgtgctttactaagtcatcgcgatggagcaaaagtatgtttaggtacaggctttacagaacagcactatgaaactgccgaaaatagtctggcctttttatgccaacaaggtttttcactagagaacgcaatgtatgcaatgcaggctgttggtatttttactttaggttgcgtattgttggatcaagagcttcaagtcgctaaagaagaaagggaaacacctactactgatagtatgccgccattagtccgacaagttctggaattaaaggatcaccaaggtgcagagccagccttcttattcggccttgaattgatcatatgcggattagaaaaacaacttaaatgtgaaagtgggtcttaa

SEQ ID NO: 701 - DNA, 627 bp, Artificial Sequence
  Sulfonylurea responsive repressor
atgggatctagattagataaaagtaaagtgattaacagcgcattagagctgcttaatgaggtcggaatcgaaggtttaacaacccgtaaactcgcccagaagctaggtgtagagcagcctacattgtattggcatgtaaaaaataagcgagctctgctcgacgcaatggccattgagatgctggataggcacgcgactcactattgccctttagaaggggaaagctggcaagattttttacgtaataacgctaaaagtatgagatgtgctttactaagtcatcgcgatggagcaaaagtatgtttaggtacaggctttacagaacagcaatatgaaagtgccgaaaatagtctggcctttttatgccaacaaggtttttcactagagaacgcaatgtatgcaatgcaggctgctggtatttatactttaggttgcgtattgttggatcaagagcttcaagtcgctaaagaagaaagggaaacacctactactgatagtatgccgccattagtccgacaagctctggaattaaaggatcaccaaggtgcagagccagccttcttattcggccttgaattgatcatatgcggattagaaaaacaacttaaatgtgaaagtgggtcttaa

SEQ ID NO: 702 - DNA, 627 bp, Artificial Sequence
  Sulfonylurea responsive repressor
atgggatctagattagataaaagtaaagtgattaacagcgcattagagctgcttaatgaggtcggaatcgaaggtttaacaacccgtaaactcgcccagaagctaggtgtagagcagcctacattgtattggcatgtaaaaaataagcgagctctgctcgacgcaatggccattgagatgctggataggcacgcgactcactattgccctttagaaggggaaagctggcaagattttttacgtaataacgctaaaagtatgagatgtgctttactaagtcatcgcgatggagcaaaagtatgtttaggtacaggctttacagaacagcaatatgaagctgccgaaaatagtctggcctttttatgccaacaaggtttttcactagagaacgcactgtatgcaatgcaggctgttggtatttatactttaggttgcgtattgttggatcaagagcttcaagtcgctaaagaagaaagggaaacacctactactgatagtatgccgccattagctcgacaagctctggaattaaaggatcaccaaggtgcagagccagccttcttattcggccttgaattgatcatatgcggattagaaaaacaacttaaatgtgaaagtgggtcttaa

SEQ ID NO: 703 - DNA, 627 bp, Artificial Sequence
  Sulfonylurea responsive repressor
atgggatctagattagataaaagtaaagtgattaacagcgcattagagctgcttaatgaggtcggaatcgaaggtttaacaacccgtaaactcgcccagaagctaggtgtagagcagcctacattgtattggcatgtaaaaaataagcgagctctgctcgacgcaatggccattgagatgctggataggcacgcgactcacttctgccctttagaaggggaaagctggcaagattttttacgtaataacgctaaaagtatgagatgtgctttactaagtcatcgcgatggagcaaaagtatgtttaggtacaggctttacagaacagcaatatgaagctgccgaaaatagtatggcctttttatgccaacaaggtttttcactagagcacgcactgtatgcaatgcaggctgttggtatttttactttaggttgcgtattgttggatcaagagcttcaagtcgctaaagaagaaagggaaacacctactactgatagtatgccgccattagtccgacaaggtctggaattaaaggatcaccaaggtgcagagccagccttcttattcggacttgaattgatcatatgcggattagaaaaacaacttaaatgtgaaagtgggtcttaa

SEQ ID NO: 704 - DNA, 627 bp, Artificial Sequence
  Sulfonylurea responsive repressor
atgggatctagattagataaaagtaaagtgattaacagcgcattagagctgcttaatgaggtcggaatcgaaggtttaacaacccgtaaactcgcccagaagctaggtgtagagcagcctacattgtattggcatgtaaaaaataagcgagctctgctcgacgcattggccattgagatgctggataggcacgcgactcactattgccctttagaaggggaaagctggcaagattttttacgtaataacgctaaaagtatgagatgtgctttactaagtcatcgcgatggagcaaaagtatgtttaggtacaggctttacagaacagatgtatgaaactgccgaaaatagtatggcctttttatgccaacaaggtttttcactagagaacgcaatgtatgcaatgcaggctgttggtatttttactttaggttgcgtattgttggatcaagagcttcaagtcgctaaagaagaaagggaaacacctactactgatagtatgccgccattagtccgacaagttctggaattaaaggatcaccaaggtgcagagccagccttcttattcggccttgaattgatcatatgcggattagaaaaacaacttaaatgtgaaagtgggtcttaa

SEQ ID NO: 705 - DNA, 627 bp, Artificial Sequence
  Sulfonylurea responsive repressor
atgggatctagattagataaaagtaaagtgattaacagcgcattagagctgcttaatgaggtcggaatcgaaggtttaacaacccgtaaactcgcccagaagctaggtgtagagcagcctacattgtattggcatgtaaaaaataagcgagctctgctcgacgcattggccattgagatgctggataggcacgcgactcactattgccctttagaaggggaaagctggcaagattttttacgtaataacgctaaaagtatgagatgtgctttactaagtcatcgcgatggagcaaaagtatgtttaggtacaggctttacagaaaagcaatatgaaagtgccgaaaatagtctggcctttttatgccaacaaggtttttcactagagcacgcactgtatgcaatgcaggctgttggtatttatactttaggttgcgtattgttggatcaagagcttcaagtcgctaaagaagaaagggaaacacctactaatgatagtatgccgccattagtccgacaagttctggaattaaaggatcaccaaggtgcagagccagccttcttattcggccttgaattgatcatatgcggattagaaaaacaacttaaatgtgaaagtgggtcttaa

SEQ ID NO: 706 - DNA, 627 bp, Artificial Sequence
  Sulfonylurea responsive repressor
atgggatctagattagataaaagtaaagtgattaacagcgcattagagctgcttaatgaggtcggaatcgaaggtttaacaacccgtaaactcgcccagaagctaggtgtagagcagcctacattgtattggcatgtaaaaaataagcgagctctgctcgacgcaatggccattgagatgctggataggcacgcgactcactattgccctttagaaggggaaagctggcaagattttttacgtaataacgctaaaagtatgagatgtgctttactaagtcatcgcgatggagcaaaagtatgtttaggtacaggctttacagaacagcaatatgaaactgccgaaaatagtatggcctttttatgccaacaaggtttttcactagagaacgcaatgtatgcaatgcaggctgcttgtatttatactttaggttgcgtattgttggatcaagagcttcaagtcgctaaagaagaaagggaaacacctactactgatagtatgccgccattagtccgacaagttctggaattaaaggatcaccaaggtgcagagccagccttcttattcggccttgaattgatcatatgcggattagaaaaacaacttaaatgtgaaagtgggtcttaa

SEQ ID NO: 707 - DNA, 627 bp, Artificial Sequence
  Sulfonylurea responsive repressor
atgggatctagattagataaaagtaaagtgattaacagcgcattagagctgcttaatgaggtcggaatcgaaggtttaacaacccgtaaactcgcccagaagctaggtgtagagcagcctacattgtattggcatgtaaaaaataagcgagctctgctcgacgcattggccattgagatgctggataggcacgcgactcactattgccctttagaaggggaaagctggcaagattttttacgtaataacgctaaaagtatgagatgtgctttactaagtcatcgcgatggagcaaaagtatgtttaggtacaggctttacagaacagatgtatgaaactgccgaaaatagtatggcctttttatgccaacaaggtttttcactagagcacgcaatgtatgcaatgcaggctgttggtatttttactttaggttgcgtattgttggatcaagagcttcaagtcgctaaagaagaaagggaaacacctactactgatagtatgccgccattagtccgacaagctctggaattaaaggatcaccaaggtgcagagccagccttcttattcggccttgaattgatcatatgcggattagaaaaacaacttaaatgtgaaagtgggtcttaa

SEQ ID NO: 708 - DNA, 627 bp, Artificial Sequence
  Sulfonylurea responsive repressor
atgggatctagattagataaaagtaaagtgattaacagcgcattagagctgcttaatgaggtcggaatcgaaggtttaacaacccgtaaactcgcccagaagctaggtgtagagcagcctacattgtattggcatgtaaaaaataagcgagctctgctcgacgcaatggccattgagatgctggataggcacgcgactcacatctgccctttagaagaggaaagctggcaagattttttacgtaataacgctaaaagtatgagatgtgctttactaagtcatcgcgatggagcaaaagtatgtttaggtacaggctttacagaacagcaatatgaaactgccgaaaatagtatggcctttttatgtcaacaaggtttttcactagagcacgcaatgtatgcaatgcaggctgcttgtatttatactttaggttgcgtattgttggatcaagagcttcaagtcgctaaagaagaaagggaaacacctactactgatagtatgccgccattagtccgacaagttctggaattaaaggatcaccaaggtgcagagccagccttcttattcggccttgaattgatcatatgcggattagaaaaacaacttaaatgtgaaagtgggtcttaa

SEQ ID NO: 709 - DNA, 627 bp, Artificial Sequence
  Sulfonylurea responsive repressor
atgggatctagattagataaaagtaaagtgattaacagcgcattagagctgcttaatgaggtcggaatcgaaggtttaacaacccgtaaactcgcccagaagctaggtgtagagcagcctacattgtattggcatgtaaaaaataagcgagctctgctcgacgcaatggccattgagatgctggataggcacgcgactcactattgccctttagaaggggaaagctggcaagattttttacgtaataacgctaaaagtatgagatgtgctttactaagtcatcgcgatggagcaaaagtatgtttaggtacaggctttacagaacagcactatgaaactgccgaaaatagtatggcctttttatgccaacaaggtttttcactagagcacgcaatgtatgcaatgcaggctgctggtatttatactttaggttgcgtattgttggatcaagagcttcaagtcgctaaagaagaaagggaaacacctactactgatagtatgccgccattagtccgacaagctctggaattaaaggatcaccaaggtgcagagccagccttcttattcggccttgaattgatcatatgcggattagaaaaacaacttaaatgtgaaagtgggtcttaa

SEQ ID NO: 710 - DNA, 627 bp, Artificial Sequence
  Sulfonylurea responsive repressor
atgggatctagattagataaaagtaaagtgattaacagcgcattagagctgcttaatgaggtcggaatcgaaggtttaacaacccgtaaactcgcccagaagctaggtgtagagcagcctacattgtattggcatgtaaaaaataagcgagctctgctcgacgcaatggccattgagatgctggataggcacgcgactcactattgccctttagaaggggaaagctggcaagattttttacgtaataacgctagaagtatgagatgtgctttactaagtcatcgcgatggagcaaaagtatgtttaggtacaggctttacagaacagatgtatgaaactgccgaaaatagtctggcctttttatgccaacaaggtttttcactagagaacgcaatgtatgcaatgcaggctgctggtatttatactttaggttgcgtattgttggatcaagagcttcaagtcgctaaagaagaaagggaaacacctactactgatagtatgccgccattagtccgacaagttctggaattaaaggatcaccaaggtgcagagccagccttcttattcggccttgaattgatcatatgcggattagaaaaacaacttaaatgtgaaagtgggtcttaa

SEQ ID NO: 711 - DNA, 627 bp, Artificial Sequence
  Sulfonylurea responsive repressor
atgggatctagattagataaaagtaaagtgattaacagcgcattagagctgcttaatgaggtcggaatcgaaggtttaacaacccgtaaactcgcccagaagctaggtgtagagcagcctacattgtattggcatgtaaaaaataagcgagctctgctcgacgcaatggccattgagatgctggataggcacgcgactcactattgccctttagaaggggaaagctggcaagattttttacgtaataacgctaaaagtatgagatgtgctttactaagtcatcgcgatggagcaaaagtatgtttaggtacaggctttacagaacagcaatatgaaagtgccgaaaatagtctggcctttttatgccaacaaggtttttcactagagaacgcactgtatgcaatgcaggctgttggtatttatactttaggttgcgtattgttggatcaagagcttcaagtcgctaaagaagaaagggaaacacctactactgatagtatgccgccattactccgacaagctctggaattaaaggatcaccaaggtgcagagccagccttcttattcggccttgaattgatcatatgcggattagaaaaacaacttaaatgtgaaagtgggtcttaa

SEQ ID NO: 712 - DNA, 627 bp, Artificial Sequence
  Sulfonylurea responsive repressor
atgggatctagattagataaaagtaaagtgattaacagcgcattagagctgcttaatgaggtcggaatcgaaggtttaacaacccgtaaactcgcccagaagctaggtgtagagcagcctacattgtattggcatgtaaaaaataagcgagctctgctcgacgcattggccattgagatgctggataggcacgcgactcactattgccctttagaaggggaaagctggcaagattttttacgtaataacgctaaaagtatgagatgtgctttactaagtcatcgcgatggagcaaaagtatgtttaggtacaggctttacagaaaagcaatatgaaagtgccgaaaatagtatggcctttttatgccaacaaggtttttcactagagcacgcactgtatgcaatgcaggctgttggtatttttactttaggttgcgtattgttggatcaagagcttcaagtcgctaaagaagaaagggaaacacctactactgatagtatgccgccattagtccgacaagttctggaattaaaggatcaccaaggtgcagagccagccttcttattcggccttgaattgatcatatgcggattagaaaaacaacttaaatgtgaaagtgggtcttaa

SEQ ID NO: 713 - DNA, 627 bp, Artificial Sequence
  Sulfonylurea responsive repressor
atgggatctagattagataaaagtaaagtgattaacagcgcattagagctgcttaatgaggtcggaatcgaaggtttaacaacccgtaaactcgcccagaagctaggtgtagagcagcctacattgtattggcatgtaaaaaataagcgagctctgctcgacgcaatggccattgagatgctggataggcacgcgactcactattgccctttagaaggggaaagctggcaagattttttacgtaataacgctaaaagtatgagatgtgctttactaagtcatcgcgatggagcaaaagtatgtttaggtacaggctttacagaacagcaatatgaaagtgccgaaaatagtatggcctttttatgccaacaaggtttttcactagagcacgcactgtatgcaatgcaggctgctggtatttatactttaggttgcgtattgttgaatcaagagcttcaagtcgctaaagaagaaagggaaacacctactactgatagtatgccgccattagtccgacaaggtctggaattaaaggatcaccaaggtgcagagccagccttcttattcggccttgaattgatcatatgcggattagaaaaacaacttaaatgtgaaagtgggtcttaa

SEQ ID NO: 714 - DNA, 627 bp, Artificial Sequence
  Sulfonylurea responsive repressor
atgggatctagattagataaaagtaaagtgattaacagcgcattagagctgcttaatgaggtcggaatcgaaggtttaacaacccgtaaactcgcccagaagctaggtgtagagcagcctacattgtattggcatgtaaaaaataagcgagctctgctcgacgcaatggccattgagatgctggatagtcacgcgactcactattgccctttagaaggggaaagctggcaagattttttacgtaataacgctaaaagtatgagatgtgctttactaagtcatcgcgatggagcaaaagtatgtttaggtacaggctttacagaacagcaatatgaaactgccgaaaatagtatggcctttttatgccaacaaggtttttcactagagcacgcaatgtatgcaatgcaggctgctggtatttttactttaggttgcgtattgttggatcaagagcttcaagtcgctaaagaagaaagggaaacacctactactgatagtatgccgccattagtccgacaaggtctggaattaaaggatcaccaaggtgcagagccagccttcttattcggccttgaattgatcatatgcggattagaaaaacaacttaaatgtgaaagtgggtcttaa

SEQ ID NO: 715 - DNA, 627 bp, Artificial Sequence
  Sulfonylurea responsive repressor
atgggatctagattagataaaagtaaagtgattaacagcgcattagagctgcttaatgaggtcggaatcgaaggtttaacaacccgtaaactcgcccagaagctaggtgtagagcagcctacattgtattggcatgtaaaaaataagcgagctctgctcgacgcaatggccattgagatgctggataggcacgcgactcactattgccctttagaaggggaaagctggccagattttttacgtaataacgctaaaagtatgagatgtgctttactaagtcatcgcgatggagcaaaagtatgtttaggtacaggctttacagaacagcaatatgaaactgccgaaaatagtctggcctttttatgccaacaaggtttttcactagagcacgcactgtatgcaatgcaggctgttggtatttatactttaggttgcgtattgttggatcaagagcttcaagtcgctaaagaagaaagggaaacacctactactgatagtatgccgccattactccgacaaggtctggaattaaaggatcaccaaggtgcagagccagccttcttattcggccttgaattgatcatatgcggattagaaaaacaacttaaatgtgaaagtgggtcttaa

SEQ ID NO: 716 - DNA, 627 bp, Artificial Sequence
  Sulfonylurea responsive repressor
atgggatctagattagataaaagtaaagtgattaacagcgcattagagctgcttaatgaggtcggaatcgaaggtttaacaacccgtaaactcgcccagaagctaggtgtagagcagcctacattgtattggcatgtaaaaaataagcgagctctgctcgacgcaatggccattgagatgctggataggcacgcgactcactattgccctttagaaggggaaagctggcaagattttttacgtaataacgctaaaagtatgagatgtgctttactaagtcatcgcgatggagcaaaagtatgtttaggtacaggctttacagaacagcaatatgaaagtgccgaaaatagtctggcctttttatgccaacaaggtttttcactagagaacgcactgtatgcaatgcaggctgttggtatttttactttaggttgcgtattgttggatcaagagcttcaagtcgctaaagaagaaagggaaacacctactactgatagtatgccgccattagtccgacaagctctggaattaaaggatcaccaaggtgcagagccagccttcttattcggccttgaattgatcatatgcggattagaaaaacaacttaaatgtgaaagtgggtcttaa

SEQ ID NO: 717 - DNA, 627 bp, Artificial Sequence
  Sulfonylurea responsive repressor
atgggatctagattagataaaagtaaagtgattaacagcgcattagagctgcttaatgaggtcggaatcgaaggtttaacaacccgtaaactcgcccagaagctaggtgtagagcagcctacattgtattggcatgtaaaaaataagcgagctctgctcgacgcattggccattgagatgctggataggcacgcgactcactattgccctttagaaggggaaagctggcaagattttttacgtaataacgctaaaagtatgagatgtgctttactaagtcatcgcgatggagcaaaagtatgtttaggtacaggctttacagaaaagcaatatgaaactgccgaaaatagtctggcctttttatgccaacaaggtttttcactagagcacgcactgtatgcaatgcaggctgttggtatttatactttaggttgcgtattgttggatcaagagcttcaagtcgctaaagaagaaagggaaacacctactactgatagtatgccgccattagtccgacaaggtctggaattaaaggatcaccaaggtgcagagccagccttcttattcggccttgaattgatcatatgcggattagaaaaacaacttaaatgtgaaagtgggtcttaa

SEQ ID NO: 718 - DNA, 627 bp, Artificial Sequence
  Sulfonylurea responsive repressor
atgggatctagattagataaaagtaaagtgattaacagcgcattagagctgcttaatgaggtcggaatcgaaggtttaacaacccgtaaactcgcccagaagctaggtgtagagcagcctacattgtattggcatgtaaaaaataagcgagctctgctcgacgcaatggccattgagatgctggataggcacgcgactcactattgccctttagaaggggaaagctggcaagattttttacgtaataacgctaaaagtatgagatgtgctttactaagtcatcgcgatggagcaaaagtatgtttaggtacaggctttacagaacagcaatatgaaactgccgaaaatagtatggcctttttatgccaacaaggtttttcactagagcacgcactgtatgcaatgcaggctgttggtatttatactttaggttgcgtattgttggatcaagagcttcaagtcgctaaagaagaaagggaaacacctactactgatagtatgccgccattagtccgacaaggtctggaattaaaggatcaccaaggtgcagagccagccttcttattcggccttgaattgatcatatgcggattagaaaaacaacttaaatgtgaaagtgggtcttaa

SEQ ID NO: 719 - DNA, 627 bp, Artificial Sequence
  Sulfonylurea responsive repressor
  misc_feature 328, 422, 521: n = A,T,C or G
atgggatctagattagataaaagtaaagtgattaacagcgcattagagctgcttaatgaggtcggaatcgaaggtttaacaacccgtaaactcgcccagaagctaggtgtagagcagcctacattgtattggcatgtaaaaaataagcgagctctgctcgacgcaatggccattgagatgctggataggcacgcgactcactattgccctttagaaggggaaagctggcaagattttttacgtaataacgctaaaagtatgagatgtgctttactaagtcatcgcgatggagcaaaagtatgtttaggtacaggctttacagaacagntgtatgaagctgccgaaaatagtctggcctttttatgccaacaaggtttttcactagagcacgcactgtatgcaatgcaggctgttggtatttntactttaggttgcgtattgttggatcaagagcttcaagtcgctaaagaagaaagggaaacacctactactgatagtatgccgccattagtccgacaagntctggaattaaaggatcaccaaggtgcagagccagccttcttattcggccttgaattgatcatatgcggattagaaaaacaacttaaatgtgaaagtgggtcttaa

SEQ ID NO: 720 - DNA, 627 bp, Artificial Sequence
  Sulfonylurea responsive repressor
atgggatctagattagataaaagtaaagtgattaacagcgcattagagctgcttaatgaggtcggaatcgaaggtttaacaacccgtaaactcgcccagaagctaggtgtagagcagcctacattgtattggcatgtaaaaaataagcgagctctgctcgacgcattggccattgagatgctggataggcacgcgactcactattgccctttagaaggggaaagctggcaagattttttacgtaataacgctaaaagtatgagatgtgctttactaagtcatcgcgatggagcaaaagtatgtttaggtacaggctttacagaacagcactatgaaactgccgaaaatagtatggcctttttatgccaacaaggtttttcactagagcacgcaatgtatgcaatgcaggctgctggtatttttactttaggttgcgtattgttggatcaagagcttcaagtcgctaaagaagaaagggaaacacctactactgatagtatgccgccattagtccgacaaggtctggaattaaaggatcaccaaggtgcagagccagccttcttattcggccttgaattgatcatatgcggattagaaaaacaacttaaatgtgaaagtgggtcttaa

SEQ ID NO: 721 - DNA, 627 bp, Artificial Sequence
  Sulfonylurea responsive repressor
atgggatctagattagataaaagtaaagtgattaacagcgcattagagctgcttaatgaggtcggaatcgaaggtttaacaacccgtaaactcgcccagaagctaggtgtagagcagcctacattgtattggcatgtaaaaaataagcgagctctgctcgacgcaatggccattgagatgctggataggcacgcgactcactattgccctttagaaggggaaagctggcaagattttttacgtaataacgctaaaagtatgagatgtgctttactaagtcatcgcgatggagcaaaagtatgtttaggtacaggctttacagaacagcaatatgaaactgccgaaaatagtctggcctttttatgccaacaaggtttttcactagagcacgcaatgtatgcaatgcaggctgttggtatttttactttaggttgcgtattgttggatcaagagcttcaagtcgctaaagaagaaagggaaacacctactactgatagtatgccgccattagtccgacaaggtctggaattaaaggatcaccaaggtgcagagccagccttcttattcggccttgaattgatcatatgcggattagaaaaacaacttaaatgtgaaagtgggtcttaa

SEQ ID NO: 722 - DNA, 627 bp, Artificial Sequence
  Sulfonylurea responsive repressor
atgggatctagattagataaaagtaaagtgattaacagcgcattagagctgcttaatgaggtcggaatcgaaggtttaacaacccgtaaactcgcccagaagctaggtgtagagcagcctacattgtattggcatgtaaaaaataagcgagctctgctcgacgcattggccattgagatgctggataggcacgcgactcactattgccctttagaaggggaaagctggcaagattttttacgtaataacgctaaaagtatgagatgtgctttactaagtcatcgcgatggagcaaaagtatgtttaggtacaggctttacagaaaagcaatatgaaactgccgaaaatagtctggcctttttatgccaacaaggtttttcactagagaacgcactgtatgcaatgcaggctgctggtatttatactttaggttgcgtattgttggatcaagagcttcaagtcgctaaagaagaaagggaaacacctactactgatagtatgccgccattagtccgacaagttctggaattaaaggatcaccaaggtgcagagccagccttcttattcggccttgaattgatcatatgcggattagaaaaacaacttaaatgtgaaagtgggtcttaa

SEQ ID NO: 723 - DNA, 627 bp, Artificial Sequence
  Sulfonylurea responsive repressor
atgggatctagattagataaaagtaaagtgattaacagcgcattagagctgcttaatgaggtcggaatcgaaggtttaacaacccgtaaactcgcccagaagctaggtgtagagcagcctacattgtattggcatgtaaaaaataagcgagctctgctcgacgcattggccattgagatgctggataggcacgcgactcactattgccctttagaaggggaaagctggcaagattttttacgtaataacgctaaaagtatgagatgtgctttactaagtcatcgcgatggagcaaaagtatgtttaggtacaggctttacagaacagcaatatgaagctgccgaaaatagtatggcctttttatgccaacaaggtttttcactagagcacgcaatgtatgcaatgcaggctgctggtatttatactttaggttgcgtattgttggatcaagagcttcaagtcgctaaagaagaaagggaaacacctactactgatagtatgccgccattactccgacaagctctggaattaaaggatcaccaaggtgcagagccagccttcttattcggccttgaattgatcatatgcggattagaaaaacaacttaaatgtgaaagtgggtcttaa

SEQ ID NO: 724 - DNA, 627 bp, Artificial Sequence; identical to SEQ ID NO: 713
  Sulfonylurea responsive repressor

SEQ ID NO: 725 - DNA, 627 bp, Artificial Sequence
  Sulfonylurea responsive repressor
  misc_feature 203, 204, 337: n = A,T,C or G
atgggatctagattagataaaagtaaagtgattaacagcgcattagagctgcttaatgaggtcggaatcgaaggtttaacaacccgtaaactcgcccagaagctaggtgtagagcagcctacattgtattggcatgtaaaaaataagcgagctctgctcgacgcaatggccattgagatgctggataggcacgcgactcactnntgccctttagaaggggaaagctggcaagattttttacgtaataacgctaaaagtatgagatgtgctttactaagtcatcgcgatggagcaaaagtatgtttaggtacaggctttacagaacagatgtatgaangtgccgaaaatagtatggcctttttatgccaacaaggtttttcactagagmacgcaatgtatgcaatgcaggctgttggtatttttactttaggttgcgtattgttggatcaagagcttcaagtcgctaaagaagaaagggaaacacctactactgatagtatgccgccattagyccgacaagttctggaattaaaggatcaccaaggtgcagagccagccttcttattcggccttgaattgatcatatgcggattagaaaaacaacttaaatgtgaaagtgggtcttaa

SEQ ID NO: 726 - DNA, 627 bp, Artificial Sequence
  Sulfonylurea responsive repressor
atgggatctagattagataaaagtaaagtgattaacagcgcattagagctgcttaatgaggtcggaatcgaaggtttaacaacccgtaaactcgcccagaagctaggtgtagagcagcctacattgtattggcatgtaaaaaataagcgagctctgctcgacgcaatggccattgagatgctggataggcacgcgactcactattgccctttagaaggggaaagctggcaagattttttacgtaataacgctaaaagtatgagatgtgctttactaagtcatcgcgatggagcaaaagtatgtttaggtacaggctttacagaacagcaatatgaaactgccgaaaatagtctggcctttttatgccaacaaggtttttcactagagcacgcactgtatgcaatgcaggctgttggtatttatactttaggttgcgtattgttggatcaagagcttcaagtcgctaaagaagaaagggaaacacctactactgatagtatgccgccattagtccgacaagctctggaattaaaggatcaccaaggtgcagagccagccttcttattcggccttgaattgatcatatgcggattagaaaaacaacttaaatgtgaaagtgggtcttaa

SEQ ID NO: 727 - DNA, 627 bp, Artificial Sequence
  Sulfonylurea responsive repressor
atgggatctagattagataaaagtaaagtgattaacagcgcattagagctgcttaatgaggtcggaatcgaaggtttaacaacccgtaaactcgcccagaagctaggtgtagagcagcctacattgtattggcatgtaaaaaataagcgagctctgctcgacgcaatggccattgagatgctggataggcacgcgactcactattgccctttagaaggggaaagctggcaagattttttacgtaataacgctaaaagtatgagatgtgctttactaagtcatcgcgatggagcaaaagtatgtttaggtacaggctttacagaacagcaatatgaaactgccgaaaatagtatggcctttttatgccaacaaggtttttcactagagcacgcaatgtatgcaatgcaggctgcttgtatttttactttaggttgcgtattgttggatcaagagcttcaagtcgctaaagaagaaagggaaacacctactactgatagtatgccgccattagtccgacaagttctggaattaaaggatcaccaaggtgcagagccagccttcttattcggccttgaattgatcatatgcggattagaaaaacaacttaaatgtgaaagtgggtcttaa

SEQ ID NO: 728 - DNA, 627 bp, Artificial Sequence
  Sulfonylurea responsive repressor
atgggatctagattagataaaagtaaagtgattaacagcgcattagagctgcttaatgaggtcggaatcgaaggtttaacaacccgtaaactcgcccagaagctaggtgtagagcagcctacattgtattggcatgtaaaaaataagcgagctctgctcgacgcattggccattgagatgctggataggcacgcgactcactattgccctttagaaggggaaagctggcaagattttttacgtaataacgctaaaagtatgagatgtgctttactaagtcatcgcgatggagcaaaagtatgtttaggtacaggctttacagaacagatgtatgaaactgccgaaaatagtctggcctttttatgccaacaaggtttttcactagagcacgcactgtatgcaatgcaggctgttggtatttttactttaggttgcgtattgttggatcaagagcttcaagtcgctaaagaagaaagggaaacacctactactgatagtatgccgccattagtccgacaaggtctggaattaaaggatcaccaaggtgcagagccagccttcttattcggccttgaattgatcatatgcggattagaaaaacaacttaaatgtgaaagtgggtcttaa

SEQ ID NO: 729 - DNA, 627 bp, Artificial Sequence
  Sulfonylurea responsive repressor
atgggatctagattagataaaagtaaagtgattaacagcgcattagagctgcttaatgaggtcggaatcgaaggtttaacaacccgtaaactcgcccagaagctaggtgtagagcagcctacattgtattggcatgtaaaaaataagcgagctctgctcgacgcaatggccattgagatgctggataggcacgcgactcacatgtgccctttagaaggggaaagctggcaagattttttacgtaataacgctaaaagtatgagatgtgctttactaagtcatcgcgatggagcaaaagtatgtttaggtacaggctttacagaacagatgtatgaaagtgccgaaaatagtatggcctttttatgccaacaaggtttttcactagagaacgcaatgtatgcaatgcaggctgttggtatttttactttaggttgcgtattgttggatcaagagcttcaagtcgctaaagaagaaagggaaacacctactactgatagtatgccgccattagctcgacaagttctggaattaaaggatcaccaaggtgcagagccagccttcttattcggccttgaattgatcatatgcggattagaaaaacaacttaaatgtgaaagtgggtcttaa

SEQ ID NO: 730 - DNA, 627 bp, Artificial Sequence
  Sulfonylurea responsive repressor
atgggatctagattagataaaagtaaagtgattaacagcgcattagagctgcttaatgaggtcggaatcgaaggtttaacaacccgtaaactcgcccagaagctaggtgtagagcagcctacattgtattggcatgtaaaaaataagcgagctctgctcgacgcaatggccattgagatgctggataggcacgcgactcacatgtgccctttagaaggggaaagctggcaagattttttacgtaataacgctaaaagtatgagatgtgctttactaagtcatcgcgatggagcaaaagtatgtttaggtacaggctttacagaacagatgtatgaaactgccgaaaatagtatggcctttttatgccaacaaggtttttcactagagaacgcaatgtatgcaatgcaggctgctggtatttatactttaggttgcgtattgttggatcaagagcttcaagtcgctaaagaagaaagggaaacacctactactgatagtatgccgccattagtccgacaagttctggaattaaaggatcaccaaggtgcagagccagccttcttattcggccttgaattgatcatatgcggattagaaaaacaacttaaatgtgaaagtgggtcttaa

SEQ ID NO: 731 - DNA, 627 bp, Artificial Sequence
  Sulfonylurea responsive repressor
atgggatctagattagataaaagtaaagtgattaacagcgcattagagctgcttaatgaggtcggaatcgaaggtttaacaacccgtaaactcgcccagaagctaggtgtagagcagcctacattgtattggcatgtaaaaaataagcgagctctgctcgacgcattggccattgagatgctggataggcacgcgactcactattgccctttagaaggggaaagctggcaagattttttacgtaataacgctaaaagtatgagatgtgctttactaagtcatcgcgatggagcaaaagtatgtttaggtacaggctttacagaacagatgtatgaaagtgccgaaaatagtctggcctttttatgccaacaaggtttttcactagagaacgcaatgtatgcaatgcaggctgctggtatttttactttaggttgcgtattgttggatcaagagcttcaagtcgctaaagaagaaagggaaacacctactactgatagtatgccgccattagtccgacaagttctggaattaaaggatcaccaaggtgcagagccagccttcttattcggccttgaattgatcatatgcggattagaaaaacaacttaaatgtgaaagtgggtcttaa

SEQ ID NO: 732 - DNA, 627 bp, Artificial Sequence
  Sulfonylurea responsive repressor
atgggatctagattagataaaagtaaagtgattaacagcgcattagagctgcttaatgaggtcggaatcgaaggtttaacaacccgtaaactcgcccagaagctaggtgtagagcagcctacattgtattggcatgtaaaaaataagcgagctctgctcgacgcaatggccattgagatgctggataggcacgcgactcacttctgccctttagaaggggaaagctggcaagattttttacgtaataacgctaaaagtatgagatgtgctttactaagtcatcgcgatggagcaaaagtatgtttaggtacaggctttacagaacagcaatatgaaggtgccgaaaatagtatggcctttttatgccaacaaggtttttcactagagaacgcaatgtatgcaatgcaggctgctggtatttttactttaggttgcgtattgttggatcaagagcttcaagtcgctaaagaagaaagggaaacacctactactgatagtatgccgccattagtccgacaagttctggaattaaaggatcaccaaggtgcagagccagccttcttattcggccttgaattgatcatatgcggattagaaaaacaacttaaatgtgaaagtgggtcttaa

SEQ ID NO: 733 - DNA, 627 bp, Artificial Sequence
  Sulfonylurea responsive repressor
  misc_feature 244, 521: n = A,T,C or G
atgggatctagattagmyaaaagtaaagtgattaacagcgcattagagctgcttaatgaggtcggaatcgaaggtttaacaacccgtaaactcgcccagaagctaggtgtagagcagcctacattgtattggcatgtaaaaaataagcgagctctgctcgacgcattggccattgagatgctggataggcacgcgactcactattgccctttagaaggggaaagctggcaagattttttacgtnataacgctaaaagtatgagatgtgctttactaagtcatcgcgatggagcaaaagtatgtttaggtacaggctttacagaacagmtgtatgaaactgccgaaaatagtctggcctttttatgccaacaaggtttttcactagagmacgcactgtatgcaatgcaggctgttggtatttatactttaggttgcgtattgttggatcaagagcttcaagtcgctaaagaagaaagggaaacacctactactgatagtatgccgccattactccgacaagntctggaattaaaggatcaccaaggtgcagagccagccttcttattcggccttgaattgatcatatgcggattagaaaaacaacttaaatgtgaaagtgggtcttaa

SEQ ID NO: 734 - DNA, 627 bp, Artificial Sequence
  Sulfonylurea responsive repressor
  misc_feature 573: n = A,T,C or G
atgggatctagattagataaaagtaaagtgattaacagcgcattagagctgcttaatgaggtcggaatcgaaggtttaacaacccgtaaactcgcccagaagctaggtgtagagcagcctacattgtattggcatgtaaaaaataagcgagctctgctcgacgcaatggccattgagatgctggataggcacgcgactcactattgccctttagaaggggaaagctggcaagattttttacgtaataacgctaaaagtatgagatgtgctttactaagtcatcgcgatggagcaaaagtatgtttaggtacaggctttacagaacagcaatatgaaactgccgaaaatagtatggcctttttatgccaacaaggtttttcactagagcacgcactgtatgcaatgcaggctgctggtatttatactttaggttgcgtattgttggatcaagagcttcaagtcgctaaagaagaaagggaaacacctactactgatagtatgccgccattactccgacaaggtctggaattaaaggatcaccaaggtgcagagccagccttcttattcggcctngaattgatcatatgcggattagaaaaacaacttaaatgtgaaagtgggtcttaa

SEQ ID NO: 735 - DNA, 627 bp, Artificial Sequence
  Sulfonylurea responsive repressor
atgggatctagattagataaaagtaaagtgattaacagcgcattagagctgcttaatgaggtcggaatcgaaggtttaacaacccgtaaactcgcccagaagctaggtgtagagcagcctacattgtattggcatgtaaaaaataagcgagctctgctcgacgcaatggccattgagatgctggataggcacgcgactcactattgccctttagaaggggaaagctggcaagattttttacgtaataacgctaaaagtatgagatgtgctttactaagtcatcgcgatggagcaaaagtatgtttaggtacaggctttacagaacagcaatatgaaactgccgaaaatagtatggcctttttatgccaacaaggtttttcactagagaacgcaatgtatgcaatgcaggctgctggtatttttactttaggttgcgtattgttggatcaagagcttcaagtcgctaaagaagaaagggaaacacctactactgatagtatgccgccattagtccgacaagttctggaattaaaggatcaccaaggtgcagagccagccttcttattcggccttgaattgatcatatgcggattagaaaaacaacttaaatgtgaaagtgggtcttaa

SEQ ID NO: 736 - DNA, 627 bp, Artificial Sequence
  Sulfonylurea responsive repressor
atgggatctagattagataaaagtaaagtgattaacagcgcattagagctgcttaatgaggtcggaatcgaaggtttaacaacccgtaaactcgcccagaagctaggtgtagagcagcctacattgtattggcatgtaaaaaataagcgagctctgctcgacgcaatggccattgagatgctggataggcacgcgactcactattgccctttagaaggggaaagctggcaagattttttacgtaataacgctagaagtatgagatgtgctttactaagtcatcgcgatggagcaaaagtatgtttaggtacaggctttacagaacagatgtatgaaactgccgaaaatagtctggcctttttatgccaacaaggtttttcactagagaacgcactgtatgcaatgcaggctgctggtatttatactttaggttgcgtattgttggatcaagagcttcaagtcgctaaagaagaaagggaaacacctactactgatagtatgccgccattagtccgacaagttctggaattaaaggatcaccaaggtgcagagccagccttcttattcggccttgaattgatcatatgcggattagaaaaacaacttaaatgtgaaagtgggtcttaa

SEQ ID NO: 737 - DNA, 627 bp, Artificial Sequence
  Sulfonylurea responsive repressor
atgggatctagattagataaaagtaaagtgattaacagcgcattagagctgcttaatgaggtcggaatcgaaggtttaacaacccgtaaactcgcccagaagctaggtgtagagcagcctacattgtattggcatgtaaaaaataagcgagctctgctcgacgcattggccattgagatgctggataggcacgcgactcactattgccctttagaaggggaaagctggcaagattttttacgtaataacgctaaaagtatgagatgtgctttactaagtcatcgcgatggagcaaaagtatgtttaggtacaggctttacagaacagatgtatgaaactgccgaaaatagtctggcctttttatgccaacaaggtttttcactagagaacgcactgtatgcaatgcaggctgctggtatttttactttaggttgcgtattgttggatcaagagcttcaagtcgctaaagaagaaagggaaacacctactactgatagtatgccgccattagtccgacaagctctggaattaaaggatcaccaaggtgcagagccagccttcttattcggccttgaattgatcatatgcggattagaaaaacaacttaaatgtgaaagtgggtcttaa

SEQ ID NO: 738 - DNA, 627 bp, Artificial Sequence
  Sulfonylurea responsive repressor
atgggatctagattagataaaagtaaagtgattaacagcgcattagagctgcttaatgaggtcggaatcgaaggtttaacaacccgtaaactcgcccagaagctaggtgtagagcagcctacattgtattggcatgtaaaaaataagcgagctctgctcgacgcaatggccattgagatgctggataggcacgcgactcactattgccctttagaaggggaaagctggcaagattttttacgtaataacgctaaaagtatgagatgtgctttactaagtcatcgcgatggagcaaaagtatgtttaggtacaggctttacagaacagcaatatgaaagtgccgaaaatagtatggcctttttatgccaacaaggtttttcactagagcacgcaatgtatgcaatgcaggctgctggtatttatactttaggttgcgtattgttggatcaagagcttcaagtcgctaaagaagaaagggaaacacctactactgatagtatgccgccattactccgacaagttctggaattaaatgatcaccaaggtgcagagccagccttcttattcggccttgaattgatcatatgcggattagaaaaacaacttaaatgtgaaagtgggtcttaa

SEQ ID NO: 739 - DNA, 627 bp, Artificial Sequence; identical to SEQ ID NO: 738
  Sulfonylurea responsive repressor

SEQ ID NO: 740 - DNA, 627 bp, Artificial Sequence
  Sulfonylurea responsive repressor
atgggatctagattagataaaagtaaagtgattaacagcgcattagagctgcttaatgaggtcggaatcgaaggtttaacaacccgtaaactcgcccagaagctaggtgtagagcagcctacattgtattggcatgtaaaaaataagcgagctctgctcgacgcaatggcctttgagatgctggataggcacgcgactcactattgccctttagaaggggaaagctggcaagattttttacgtaataacgctaaaagtatgagatgtgctttactaagtcatcgcgatggagcaaaagtatgtttaggtacaggctttacagaacagcaatatgaaactgccgaaaatagtatggcctttttatgccaacaaggtttttcactagagaacgcactgtatgcaatgcaggctgtttgtatttatactttaggttgcgtattgttggatcaagagcttcaagtcgctaaagaagaaagggaaacacctactactgatagtatgccgccattactccgacaagctctggaaataaaggatcaccaaggtgcagagccagccttcttattcggccttgaattgatcatatgcggattagaaaaacaacttaaatgtgaaagtgggtcytaa

SEQ ID NO: 741 - DNA, 627 bp, Artificial Sequence
  Sulfonylurea responsive repressor
atgggatctagattagataaaagtaaagtgattaacagcgcattagagctgcttaatgaggtcggaatcgaaggtttaacaacccgtaaactcgcccagaagctaggtgtagagcagcctacattgtattggcatgtaaaaaataagcgagctctgctcgacgcaatggccattgagatgctggataggcacgcgactcactattgccctttagaaggggaaagctggcaagattttttacgtaataacgctaaaagtatgagatgtgctttactaagtcatcgcgatggagcaaaagtatgtttaggtacaggctttacagaacagcaatatgaaactgccgaaaatagtctggcctttttatgccaacaaggtttttcactagagcacgcactgtatgcaatgcaggctgttggtatttatactttaggctgcgtattgttggatcaagagcttcaagtcgctaaagaagaaagggaaacacctactactgatagtatgccgccattagtccgacaaggtctggaattaaaggatcaccaaggtgcagagccagccttcttattcggccttgaattgatcatatgcggattagaaaaacaacttaaatgtgaaagtgggtcttaa

SEQ ID NO: 742 - DNA, 627 bp, Artificial Sequence
  Sulfonylurea responsive repressor
atgggatctagattagataaaagtaaagtgattaacagcgcattagagctgcttaatgaggtcggaatcgaaggtttaacaacccgtaaactcgcccagaagctaggtgtagagcagcctacattgtattggcatgtaaaaaataagcgagctctgctcgacgcattggccattgagatgctggataggcacgcgactcacgtgtgccctttagaaggggaaagctggcaagattttttacgtaataccgctaaaagtatgagatgtgctttactaagtcatcgcgatggagcaaaagtatgtttaggtacaggctttacagaacagcaatatgaagctgccgaaaatagtatggcctttttatgccaacaaggtttttcactagagcacgcgctgtatgcaatgcaggctgctggtatttttactttaggttgcgtattgttggatcaagagcttcaagtcgctaaagaagaaagggaaacacctactactgatagtatgccgccattagtccgacaagttctggaattaaaggatcaccaaggtgcagagccagccttcttattcggccttgaattgatcatatgcggattagaaaaacaacttaaatgtgaaagtgggtcttaa

SEQ ID NO: 743 - DNA, 627 bp, Artificial Sequence
  Sulfonylurea responsive repressor
atgggatctagattagataaaagtaaagtgattaacagcgcattagagctgcttaatgaggtcggaatcgaaggtttaacaacccgtaaactcgcccagaagctaggtgtagagcagcctacattgtattggcatgtaaaaaataagcgagctctgctcgacgcaatggccattgagatgctggataggcacgcgactcacatctgccctttagaaggggaaagctggcaagattttttacgtaataacgctaaaagtatgagatgtgctttactaagtcatcgcgatggagcaaaagtatgtttaggtacaggctttacagaacagcaatatgaagctgccgaaaatagtctggcctttttatgccaacaaggtttttcactagagcacgcactgtatgcaatgcaggctgttggtatttatactttaggttgcgtattgttggatcaagagcttcaagtcgctaaagaagaaagggaaacacctactactgatagtatgccgccattagtccgacaagctctggaattaaaggatcaccaaggtgcagagccagccttcttattcggccttgaattgatcatatgcggattagaaaaacaacttaaatgtgaaagtgggtcttaa

SEQ ID NO: 744 - DNA, 627 bp, Artificial Sequence
  Sulfonylurea responsive repressor
atgggatctagattagataaaagtaaagtgattaacagcgcattagagctgcttaatgaggtcggaatcgaaggtttaacaacccgtaaactcgcccagaagctaggtgtagagcagcctacattgtattggcatgtaaaaaataagcgagctctgctcgacgcattggccattgagatgctggataggcacgcgactcactattgccctttagaaggggaaagctggcaagattttttacgtaataacgctaaaagtatgagatgtgctttactaagtcatcgcgatggagcaaaagtatgtttaggtacaggctttacagaaaagcaatatgaaactgccgaaaatagtctggcctttttatgccaacaaggtttttcactagagaacgcactgtatgcaatgcaggctgttggtatttttactttaggttgcgtattgttggatcaagagcttcaagtcgctaaagaagaaagggaaacacctactactgatagtatgccgccattagtccgacaagctctggaattaaaggatcaccaaggtgcagagccagccttcttattcggccttgaattgatcatatgcggattagaaaaacaacttaaatgtgaaagtgggtcttaa

SEQ ID NO: 745 - DNA, 627 bp, Artificial Sequence
  Sulfonylurea responsive repressor
atgggatctagattagataaaagtaaagtgattaacagcgcattagagctgcttaatgaggtcggaatcgaaggtttaacaacccgtaaactcgcccagaagctaggtgtagagcagcctacattgtattggcatgtaaaaaataagcgagctctgctcgacgcaatggccattgagatgctggataggcacgcgactcacttgtgccctttagaaggggaaagctggcaagattttttacgtaataacgctaaaagtatgagaagtgctttactaattcatcgcgatggagcaaaagtatgtttaggtacaggctttacagaacagcaatatgaagctgccgaaaatagtatggcctttttatgccaacaaggtttttcactagagaacgcaatgtatgcaatgcaggctgttggtatttatactttaggttgcgtattgttggatcaagagcttcaagtcgctaaagaagaaagggaaacacctactactgatcgtatgccgccattagctcgacaagctctggaattaaaggatcaccaaggtgcagagccagccttcttattcggccttgaattgatcatatgcggattagaaaaacaacttaaatgtgaaagtgggtcttaa

SEQ ID NO: 746 - DNA, 627 bp, Artificial Sequence
  Sulfonylurea responsive repressor
atgggatctagattagataaaagtaaagtgattaacagcgcattagagctgcttaatgaggtcggaatcgaaggtttaacaacccgtaaactcgcccagaagctaggtgtagagcagcctacattgtattggcatgtaaaaaataagcgagctctgctcgacgcaatggccattgagatgctggataggcacgcgactcactattgccctttagaaggggaaagctggcaagattttttacgtaataacgctaaaagtatgagatgtgctttactaagtcatcgcgatggagcaaaagtatgtttaggtacaggctttacagaacagcaatatgaagctgccgaaaatagtctggcctttttatgccaacaaggtttttcactagagaacgcaatgtatgcaatgcaggctgctggtatttatactttaggttgcgtattgttggatcaagagcttcaagtcgctaaagaagaaagggaaacacctactactgatagtatgccgccattagtccgacaaggtctggaattaaaggatcaccaaggtgcagagccagccttcttattcggccttgaattgatcatatgcggattagaaaaacaacttaaatgtgaaagtgggtcttaa

SEQ ID NO: 747 - DNA, 627 bp, Artificial Sequence
  Sulfonylurea responsive repressor
atgggatctagattagataaaagtaaagtgattaacagcgcattagagctgcttaatgaggtcggaatcgaaggtttaacaacccgtaaactcgcccagaagctaggtgtagagcagcctacattgtattggcatgtaaaaaataagcgagctctgctcgacgcaatggccattgagatgctggataggcacgcgactcactattgccctttagaaggggaaagctggcaagattttttacgtaataacgctaaaagtatgagatgtgctttactaagtcatcgcgatggagcaaaagtatgtttaggtacaggctttacagaacagcaatatgaagctgccgaaaatagtatggcctttttatgccaacaaggtttttcactagagaacgcaatgtattcaatgcaggctgttggtatttttactttaggttgcgtattgttggatcaagagcttcaagtcgctaaagaagaaagggaaacacctactactgatagtatgccgccattagtccgacaaggtctggaattaaaggatcaccaaggtgcagagccagccttcttattcggccttgaattgatcatatgcggattagaaaaacaacttaaatgtgaaagtgggtcttaa

SEQ ID NO: 748 - DNA, 627 bp, Artificial Sequence
  Sulfonylurea responsive repressor
atgggatctagattagataaaagtaaagtgattaacagcgcattagagctgcttaatgaggtcggaatcgaaggtttaacaacccgtaaactcgcccagaagctaggtgtagagcagcctacattgtattggcatgtaaaaaataagcgagctctgctcgacgcattggccattgagatgctggataggcacgcgactcactattgccctttagaaggggaaagctggcaagattttttacgtaataacgctaaaagtatgagatgtgctttactaagtcatcgcgatggagcaaaagtatgtttaggtacaggctttacagaaaagcaatatgaaagtgccgaaaatagtctggcctttttatgccaacaaggtttttcactagagcacgcactgtatgcaatgcaggctgttggtatttatactttaggttgcgtattgttggatcaagagcttcaagtcgctaaagaagaaagggaaacacctactactgatagtatgccgccattagtccgacaagctctggaattaaaggatcaccaaggtgcagagccagccttcttattcggccttgaattgatcatatgcggatttgaaaaacaacttaaatgtgaaagtgggtcttaa

SEQ ID NO: 749 - DNA, 627 bp, Artificial Sequence
  Sulfonylurea responsive repressor
  misc_feature 328, 511: n = A,T,C or G
atgggatctagattagataaaagtaaagtgattaacagcgcattagagctgcttaatgaggtcggaatcgaaggtttaacaacccgtaaactcgcccagaagctaggtgtagagcagcctacattgtattggcatgtaaaaaataagcgagctctgctcgacgcaatggccattgagatgctggataggcacgcgactcactattgccctttagaaggggaaagctggcaagattttttacgtaataacgctaaaagtatgagatgtgctttactaagtcatcgcgatggagcaaaagtatgtttaggtacaggctttacagaacagntgtatgaaactgccgaaaatagtatggcctttttatgccaacaaggtttttcactagagaacgcactgtatgcaatgcaggctgctggtatttatactttaggttgcgtattgttggatcaagagcttcaagtcgctaaagaagaaagggaaacacctactactgatagtatgccgccattantccgacaagctctggaattaaaggatcaccaaggtgcagagccagccttcttattcggccttgaattgatcatatgcggattagaaaaacaacttaaatgtgaaagtgggtcttaa

SEQ ID NO: 750 - DNA, 627 bp, Artificial Sequence
  Sulfonylurea responsive repressor
atgggatctagattagataaaagtaaagtgattaacagcgcattagagctgcttaatgaggtcggaatcgaaggtttaacaacccgtaaactcgcccagaagctaggtgtagagcagcctacattgtattggcatgtaaaaaataagcgagctctgctcgacgcaatggccattgagatgctggataggcacgcgactcactattgccctttagaaggggaaagctggcaagattttttacgtaataacgctaaaagtatgagatgtgctttactaagtcatcgcgatggagcaaaagtatgtttaggtacaggctttacagaacagcaatatgaaactgccgaaaatagtatggcctttttatgccaacaaggtttttcactagagaacgcaatgtatgcaatgcaggctgctggtatttttactttaggttgcgtattgttggatcaagagcttcgagtcgctaaagaagaaagggaaacacctactactgatagtatgccgccattactccgacaagttctggaattaaaggatcaccaaggtgcagagccagccttcttattcggccttgaattgatcatatgcggattagaaaaacaacttaaatgtgaaagtgggtcttaa

SEQ ID NO: 751 - DNA, 627 bp, Artificial Sequence
  Sulfonylurea responsive repressor
atgggatctagattagataaaagtaaagtgattaacagcgcattagagctgcttaatgaggtcggaatcgaaggtttaacaacccgtaaactcgcccagaagctaggtgtagagcagcctacattgtattggcatgtaaaaaataagcgagctctgctcgacgcaatggccattgagatgctggataggcacgcgactcactattgccctttagaaggggaaagctggcaagattttttacgtaataacgctaaaagtatgagatgtgctttactaagtcatcgcgatggagcaaaagtatgtttaggtacaggctttacagaacagcaatatgaaactgccgaaaatagtctggcctttttatgccaacaaggtttttcactagagaacgcaatgtatgcaatgcaggctgttggtatttttactttaggttgcgtattgttggatcaagagcttcaagtcgctaaagaagaaagggaaacacctactactgatagtatgccgccattactccgacaagttctggaattaaaggatcaccaaggtgcagagccagccttcttattcggccttgaattgatcatatgcggattagaaaaacaacttaaatgtgaaagtgggtcttaa

SEQ ID NO: 752 - DNA, 627 bp, Artificial Sequence
  Sulfonylurea responsive repressor
atgggatctagattagataaaagtaaagtgattaacagcgcattagagctgcttaatgaggtcggaatcgaaggtttaacaacccgtaaactcgcccagaagctaggtgtagagcagcctacattgtattggcatgtaaaaaataagcgagctctgctcgacgcaatggccattgagatgctggataggcacgcgactcactattgccctttagaaggggaaagctggcaagattttttacgtaataacgctaaaagtatgagatgtgctttactaagtcatcgcgatggagcaaaagtatgtttaggtacaggctttacagaacagcaatatgaaggtgccgaaaatagtatggcctttttatgccaacaaggtttttcactagagaacgcactgtatgcaatgcaggctgttggtatttatactttaggttgcgtattgttggatcaagagcttcaagtcgctaaagaagaaagggaaacacctactactgatagtatgccgtcattagtccgacaagttctggaattaaaggatcaccaaggtgcagagccagccttcttattcggccttgaattgatcatatgcggattagaaaaacaacttaaatgtgaaagtgggtcttaa

SEQ ID NO: 753 - DNA, 627 bp, Artificial Sequence
  Sulfonylurea responsive repressor
  misc_feature 166, 337: n = A,T,C or G
atgggatctagattagataaaagtaaagtgattaacagcgcattagagctgcttaatgaggtcggaatcgaaggtttaacaacccgtaaactcgcccagaagctaggtgtagagcagcctacattgtattggcatgtaaaaaataagcgagctctgctcgacgcantggccattgagatgctggataggcacgcgactcactattgccctttagaaggggaaagctggcaagattttttacgtaataacgctaaaagtatgagatgtgctttactaagtcatcgcgatggagcaaaagtatgtttaggtacaggctttacagaacagcaatatgaanctgccgaaaatagtctggcctttttatgccaacaaggtttttcactagagcacgcactgtatgcaatgcaggctgctggtatttatactttaggttgcgtattgttggatcaagagcttcaagtcgctaaagaagaaagggaaacacctactactgatagtatgccgccattactccgacaagctctggaattaaaggatcaccaaggtgcagagccagccttcttattcggccttgaattgatcatatgcggattagaaaaacaacttaaatgtgaaagtgggtcttaa

SEQ ID NO: 754 - DNA, 627 bp, Artificial Sequence
  Sulfonylurea responsive repressor
atgggatctagattagataaaagtaaagtgattaacagcgcattagagctgcttaatgaggtcggaatcgaaggtttaacaacccgtaaactcgcccagaagctaggtgtagagcagcctacattgtattggcatgtaaaaaataagcgagctctgctcgacgcattggccattgagatgctggataggcacgcgactcactattgccctttagaaggggaaagctggcaagattttttacgtaataacgctaaaagtatgagatgtgctttactaagtcatcgcgatggagcaaaagtatgtttaggtacaggctttacagaacagatgtatgaaactgccgaaaatagtatggcctttttatgccaacaaggtttttcactagagaacgcaatgtatgcaatgcaggctgctggtatttatactttaggttgcgtattgttggatcaagagcttcaagtcgctaaagaagaaagggaaacacctactactgatagtatgccgccattagtccgacaaggtctggaattaaaggatcaccaaggtgcagagccagccttcttattcggccttgaattgatcatatgcggattagaaaaacaacttaaatgtgaaagtgggtcttaa

SEQ ID NO: 755 - DNA, 627 bp, Artificial Sequence; identical to SEQ ID NO: 652
  Sulfonylurea responsive repressor

SEQ ID NO: 756 - DNA, 627 bp, Artificial Sequence
  Sulfonylurea responsive repressor
atgggatctagattagataaaagtaaagtgattaacagcgcattagagctgcttaatgaggtcggaatcgaaggtttaacaacccgtaaactcgcccagaagctaggtgtagagcagcctacattgtattggcatgtaaaaaataagcgagctctgctcgacgcattggccattgagatgctggataggcacgcgactcactattgccctttagaaggggaaagctggcaagattttttacgtaataacgctaaaagtatgagatgtgctttactaagtcatcgcgatggagcaaaagtatgtttaggtacaggctttacagaaaagcaatatgaaactgccgaaaatagtatggcctttttatgccaacaaggtttttcactagagcacgcaatgtatgcaatgcaggccgctggtatttatactttaggttgcgtattgttggatcaagagcttcaagtcgctaaagaagaaagggaaacacctactactgatagtatgccgccattagtccgacaagctctggaattaaaggatcaccaaggtgcagagccagccttcttattcggccttgaattgatcatatgcggattagaaaaacaacttaaatgtgaaagtgggtcttaa

SEQ ID NO: 757 - DNA, 627 bp, Artificial Sequence
  Sulfonylurea responsive repressor
atgggatctagattagataaaagtaaagtgattaacagcgcattagagctgcttaatgaggtcggaatcgaaggtttaacaacccgtaaactcgcccagaagctaggtgtagagcagcctacattgtattggcatgtaaaaaataagcgagctctgctcgacgcaatggccattgagatgctggataggcacgcgactcacttgtgccctttagaaggggaaagctggcaagattttttacgtaataacgctaaaagtatgagatgtgctttactaagtcatcgcgatggagcaaaagtatgtttaggtacaggctttacagaacagatgtatgaaactgccgaaaatagtctggcctttttatgccaacaaggtttttcactagagaacgcactgtatgcaatgcaggctgctggtatttatactttaggttgcgtattgttggatcaagagcttcaagtcgctaaagaagaaagggaaacacctactactgatagtatgccgccattagtccgacaagttctggaattaaaggatcaccaaggtgcagagccagccttcttattcggccttgaattgatcatatgcggattagaaaaacaacttaaatgtgaaagtgggtcttaa

SEQ ID NO: 758 - DNA, 627 bp, Artificial Sequence
  Sulfonylurea responsive repressor
  misc_feature 325: n = A,T,C or G
atgggatctagattagataaaagtaaagtgattaacagcgcattagagctgcttaatgaggtcggaatcgaaggtttaacaacccgtaaactcgcccagaagctaggtgtagagcagcctacattgtattggcatgtaaaaaataagcgagctctgctcgacgcattggccattgagatgctggataggcacgcgactcactattgccctttagaaggggaaagctggcaagattttttacgtaataacgctaaaagtatgagatgtgctttactaagtcatcgcgatggagcaaaagtatgtttaggtacaggctttacagaanagcaatatgaagctgccgaaaatagtctggcctttttatgccaacaaggtttttcactagagcacgcactgtatgcaatgcaggctgttggtatttatactttaggttgcgtattgttggatcaagagcttcaagtcgctaaagaagaaagggaaacacctactactgatagtatgccgccattagtccgacaagctctggaattaaaggatcaccaaggtgcagagccagccttcttattcggccttgaattgatcatatgcggattagaaaaacaacttaaatgtgaaagtgggtcttaa

SEQ ID NO: 759 - DNA, 627 bp, Artificial Sequence
  Sulfonylurea responsive repressor
atgggatctagattagataaaagtaaagtgattaacagcgcattagagctgcttaatgaggtcggaatcgaaggtttaacaacccgtaaactcgcccagaagctaggtgtagagcagcctacattgtattggcatgtaaaaaataagcgagctctgctcgacgcaatggccattgagatgctggataggcacgcgactcactattgccctttagaaggggaaagctggcaagattttttacgtaataacgctaaaagtatgagatgtgctttactaagtcatcgcgatggagcaaaagtatgtttaggtacaggctttacagaacagcaatatgaaagtgccgaaaatagtctggcctttttatgccaacaaggtttttcactagagcacgcaatgtatgcaatgcaggctgctggtatttttactttaggttgcgtattgttggatcaagagcttcaagtcgctaaagaagaaagggaaacacctactactgatagtatgccgccattagtccgacaagctctggaattaaaggatcaccaaggtgcagagccagccttcttattcggccttgaattgatcatatgcggattagaaaaacaacttaaatgtgaaagtgggtcttaa

SEQ ID NO: 760 - DNA, 627 bp, Artificial Sequence
  Sulfonylurea responsive repressor
atgggatctagattagataaaagtaaagtgattaacagcgcattagagctgcttaatgaggtcggaatcgaaggtttaacaacccgtaaactcgcccagaagctaggtgtagagcagcctacattgtattggcatgtaaaaaataagcgagctctgctcgacgcattggccattgagatgctggataggcacgcgacacactattgccctttagaaggggaaagctggcaagattttttacgtaataacgctaaaagtatgagatgtgctttactaagtcatcgcgatggagcaaaagtatgtttaggaacaggctttacagaacagatgtatgaaactgccgaaaatagtctggcctttttatgccaacaaggtttttcactagagcacgcaatgtatgcaatgcaggctgctggtatttttactttaggttgcgtattgttggatcaagagcttcaagtcgctaaagaagaaagggaaacacctactactgatagtatgccgccattagtccgacaagttctggaattaaaggatcaccaaggtgcagagccagccttcttattcggccttgaattgatcatatgcggattagaaaaacaacttaaatgtgaaagtgggtcttaa

SEQ ID NO: 761 - DNA, 627 bp, Artificial Sequence
  Sulfonylurea responsive repressor
atgggatctagattagataaaagtaaagtgattaacagcgcattagagctgcttaatgaggtcggaatcgaaggtttaacaacccgtaaactcgcccagaagctaggtgtagagcagcctacattgtattggcatgtaaaaaataagcgagctctgctcgacgcattggccattgagatgctggataggcacgcgactcactattgccctttagaaggggaaagctggcaagattttttacgtaataacgctaaaagtatgagatgtgctttactaagtcatcgcgatggagcaaaagtatgtttaggtacaggctttacagaacagatgtatgaagctgccgaaaatagtctggcctttttatgccaacaaggtttttcactagagcacgcaatgtatgcaatgcaggctgttggtatttatactttaggttgcgtattgttggatcaagagcttcaagtcgctaaagaagaaagggaaacacctactactgatagtatgccgccattagtccgacaaggtctggaattaaaggatcaccaaggtgcagagccagccttcttattcggccttgaattgatcatatgcggattagaaaaacaacttaaatgtgaaagtgggtcttaa

SEQ ID NO: 762 - DNA, 627 bp, Artificial Sequence
  Sulfonylurea responsive repressor
  misc_feature 166, 203, 204, 329, 330, 388, 415, 422: n = A,T,C or G
atgggatctagattagataaaagtaaagtgattaacagcgcattagagctgcttaatgaggtcggaatcgaaggtttaacaacccgtaaactcgcccagaagctaggtgtagagcagcctacattgtattggcatgtaaaaaataagcgagctctgctcgacgcantggccattgagatgctggataggcacgcgactcactnntgccctttagaaggggaaagctggcaagattttttacgtaataacgctaaaagtatgagatgtgctttactaagtcatcgcgatggagcaaaagtatgtttaggtacaggctttacagaacagcnntatgaaactgccgaaaatagtctggcctttttatgccaacaaggtttttcactagagnacgcaatgtatgcaatgcaggctgctngtatttntactttaggttgcgtattgttggatcaagagcttcaagtcgctaaagaagaaagggaaacacctactactgatagtatgccgccattagtccgacaagctctggaattaaaggatcaccaaggtgcagagccagccttcttattcggccttgaattgatcatatgcggattagaaaaacaacttaaatgtgaaagtgggtcttaa

SEQ ID NO: 763 - DNA, 627 bp, Artificial Sequence
  Sulfonylurea responsive repressor
  misc_feature 511: n = A,T,C or G
atgggatctagattagataaaagtaaagtgattaacagcgcattagagctgcttaatgaggtcggaatcgaaggtttaacaacccgtaaactcgcccagaagctaggtgtagagcagcctacattgtattggcatgtaaaaaataagcgagctctgctcgacgcaatggccattgagatgctggataggcacgcgactcactattgccctttagaaggggaaagctggcaagattttttacgtaataacgctaaaagtatgagatgtgctttactaagtcatcgcgatggagcaaaagtatgtttaggtacaggctttacagaacagcaatatgaaagtgccgaaaatagtctggcctttttatgccaacaaggtttttcactagagaacgcaatgtatgcaatgcaggctgctggtatttatactttaggttgcgtattgttggatcaagagcttcaagtcgctaaagaagaaagggaaacacctactactgatagtatgccgccattantccgacaagctctggaattaaaggatcaccaaggtgcagagccagccttcttattcggccttgaattgatcatatgcggattagaaaaacaacttaaatgtgaaagtgggtcttaa

SEQ ID NO: 764 - DNA, 627 bp, Artificial Sequence
  Sulfonylurea responsive repressor
atgggatctagattagataaaagtaaagtgattaacagcgcattagagctgcttaatgaggtcggaatcgaaggtttaacaacccgtaaactcgcccagaagctaggtgtagagcagcctacattgtattggcatgtaaaaaataagcgagctctgctcgacgcaatggccattgagatgctggataggcacgcgactcacatctgccctttagaaggggaaagctggcaagattttttacgtaataacgctaaaagtatgagatgtgctttactaagtcatcgcgatggagcaaaagtatgtttaggtacaggctttacagaacagcaatatgaaactgccgaaaatagtctggcctttttatgccaacaaggtttttcactagagcacgcaatgtatgcaatgcaggctgctggtatttatactttaggttgcgtattgttggatcaagagcttcaagtcgctaaagaagaaagggaaacacctactactgatagtatgccgccattagtccgacaagttctggaattaaaggatcaccaaggtgcagagccagccttcttattcggccttgaattgatcatatgcggattagaaaaacaacttaaatgtgaaagtgggtcttaa

SEQ ID NO: 765 - DNA, 627 bp, Artificial Sequence
  Sulfonylurea responsive repressor
  misc_feature 388: n = A,T,C or G
atgggatctagattagataaaagtaaagtgattaacagcgcattagagctgcttaatgaggtcggaatcgaaggtttaacaacccgtaaactcgcccagaagctaggtgtagagcagcctacattgtattggcatgtaaaaaataagcgagctctgctcgacgcaatggccattgagatgctggataggcacgcgactcacatgtgccctttagaaggggaaagctggcaagattttttacgtaataacgctaaaagtatgagatgtgctttactaagtcatcgcgatggagcaaaagtatgtttaggtacaggctttacagaacagcaatatgaaagtgccgaaaatagtatggcctttttatgccaacaaggtttttcactagagnacgcaatgtatgcaatgcaggctgttggtatttttactttaggttgcgtattgttggatcaagagcttcaagtcgctaaagaagaaagggaaacacctactactgatagtatgccgccattagtccgacaaggtctggaattaaaggatcaccaaggtgcagagccagccttcttattcggccttgaattgatcatatgcggattagaaaaacaacttaaatgtgaaagtgggtcttaa

SEQ ID NO: 766 - DNA, 627 bp, Artificial Sequence
  Sulfonylurea responsive repressor
atgggatctagattagataaaagtaaagtgattaacagcgcattagagctgcttaatgaggtcggaatcgaaggtttaacaacccgtaaactcgcccagaagctaggtgtagagcagcctacattgtattggcatgtaaaaaataagcgagctctgctcgacgcattggccattgagatgctggataggcacgcgactcactattgccctttagaaggggaaagctggcaagattttttacgtaataacgctaaaagtatgagatgtgctttactaagtcatcgcgatggagcaaaagtatgtttaggtacaggctttacagaaaagcaatatgaaagtgccgaaaatagtatggcctttttatgccaacaaggtttttcactagagcacgcactgtatgcaatgcaggctgttggtatttatactttaggttgcgtattgttggatcaagagcttcaagtcgctaaagaagaaagggaaacacctactactgatagtatgccgccattagtccgacaaggtctggaattaaaggatcaccaaggtgcagagccagccttcttattcggccttgaattgatcatatgcggattagaaaaacaacttaaatgtgaaagtgggtcttaa

SEQ ID NO: 767 - DNA, 627 bp, Artificial Sequence
  Sulfonylurea responsive repressor
atgggatctagattagataaaagtaaagtgattaacagcgcattagagctgcttaatgaggtcggaatcgaaggtttaacaacccgtaaactcgcccagaagctaggtgtagagcagcctacattgtattggcatgtaaaaaataagcgagctctgctcgacgcaatggccattgagatgctggataggcacgcgactcactattgccctttagaaggggaaagctggcaagattttttacgtaataacgctaaaagtatgagatgtgctttactaagtcatcgcgatggagcaaaagtatgtttaggtacaggctttacagaacagcaatatgaaggtgccgaaaatagtctggcctttttatgccaacaaggtttttcactagagcacgcaatgtatgcaatgcaggctgttggtatttttactttaggttgcgtattgttggatcaagagcttcaagtcgctaaagaagaaagggaaacacctactactgatagtatgccgccattagtccgacaaggtctggaattaaaggatcaccaaggtgcagagccagccttcttattcggccttgaattgatcatatgcggattagaaaaacaacttaaatgtgaaagtgggtcttaa

SEQ ID NO: 768 - DNA, 627 bp, Artificial Sequence
  Sulfonylurea responsive repressor
atgggatctagattagataaaagtaaagtgattaacagcgcattagagctgcttaatgaggtcggaatcgaaggtttaacaacccgtaaactcgcccagaagctaggtgtagagcagcctacattgtattggcatgtaaaaaataagcgagctctgctcgacgcaatggccattgagatgctggataggcacgcgactcactattgccctttagaaggggaaagctggcaagattttttacgtaataacgctaaaagtatgagatgtgctttactaagtcatcgcgatggagcaaaagtatgtttaggtacaggctttacagaacagcaatatgaaagtgccgaaaatagtctggcctttttatgccaacaaggtttttcactagagaacgcaatgtatgcaatgcaggctgttggtatttttactttaggttgcgtattgttggatcaagagcttcaagtcgctaaagaagaaagggaaacacctactactgatagtatgccgccattactccgacaagttctggaattaaaggatcaccaaggtgcagagccagccttcttattcggccttgaattgatcatatgcggattagaaaaacaacttaaatgtgaaagtgggtcttaa

SEQ ID NO: 769 - DNA, 627 bp, Artificial Sequence
  Sulfonylurea responsive repressor
atgggatctagattagataaaagtaaagtgattaacagcgcattagagctgcttaatgaggtcggaatcgaaggtttaacaacccgtaaactcgcccagaagctaggtgtagagcagcctacattgtattggcatgtaaaaaataagcgagctctgctcgacgcaatggccattgagatgctggataggcacgcgactcacatctgccctttagaaggggaaagctggcaagattttttacgtaataacgctaaaagtatgagatgtgctttactaagtcatcgcgatggagcaaaagtatgtttaggtacaggctttacagaacagcaatatgaaactgccgaaaatagtctggcctttttatgccaacaaggtttttcactagagaacgcaatgtatgcaatgcaggctgttggtatttatactttaggttgcgtattgttggatcaagagcttcaagtcgctaaagaagaaagggaaacacctactactgatagtatgccgccattagtccgacaagctctggaattaaaggatcaccaaggtgcagagccagccttcttattcggccttgaattgatcatatgcggattagaaaaacaacttaaatgtgaaagtgggtcttaa

SEQ ID NO: 770 - DNA, 627 bp, Artificial Sequence
  Sulfonylurea responsive repressor
atgggatctagattagataaaagtaaagtgattaacagcgcattagagctgcttaatgaggtcggaatcgaaggtttaacaacccgtaaactcgcccagaagctaggtgtagagcagcctacattgtattggcatgtaaaaaataagcgagctctgctcgacgcaatggccattgagatgctggataggcacgcgactcactattgccctttagaaggggaaagctggcaagattttttacgtaataacgctaaaagtatgagatgtgctttactaagtcaacgcgatggagcaaaagtatgtttaggtacaggctttacagaacagcaatatgaagctgccgaaaatagtctggcctttttatgccaacaaggtttttcactagagaacgcaatgtatgcaatgcaggctgttggtatttttactttaggttgcgtattgttggatcaagagcttcaagtcgctaaagaagaaagggaaacacctactactgatagtatgccgccattagtccgacaagctctggaattaaaggatcaccaaggtgcagagccagccttcttattcggccttgaattgatcatatgcggattagaaaaacaacttaaatgtgaaagtgggtcttaa

SEQ ID NO: 771 - DNA, 627 bp, Artificial Sequence
  Sulfonylurea responsive repressor
atgggatctagattagataaaagtaaagtgattaacagcgcattagagctgcttaatgaggtcggaatcgaaggtttaacaacccgtaaactcgcccagaagctaggtgtagagcagcctacattgtattggcatgtaaaaaataagcgagctctgctcgacgcaatggccattgagatgctggataggcacgcgactcactattgccctttagaaggggaaagctggcaagattttttacgtaataacgctaaaagtatgagatgtgctttactaagtcatcgcgatggagcaaaagtatgtttaggtacaggctttacagaacagcaatatgaaggggccgaaaatagtatggcctttttatgccaacaaggtttttcactagagaacgcactgtatgcaatgcaggctgttggtatttatactttaggttgcgtattgttggatcaagagcttcaagtcgctaaagaagaaagggaaacacctactactgatagtatgccgccattagtccgacaagttctggaattaaaggatcaccaaggtgcagagccagccttcttattcggccttgaattgatcatatgcggattagaaaaacaacttaaatgtgaaagtgggtcttaa

SEQ ID NO: 772 - DNA, 627 bp, Artificial Sequence
  Sulfonylurea responsive repressor
atgggatctagattagataaaagtaaagtgattaacagcgcattagagctgcttaatgaggtcggaatcgaaggtttaacaacccgtaaactcgcccagaagctaggtgtagagcagcctacattgtattggcatgtaaaaaataagcgagctctgctcgacgcaatggccattgagatgctggataggcacgcgactcactattgccctttagaaggggaaagctggcaagattttttacgtaataacgctaaaagtatgagatgtgctttactaagtcatcgcgatggagcaaaagtatgtttaggtacaggctttacagaacagcaatatgaaggtgccgaaaatagtatggcctttttatgccaacaaggtttttcactagagaacgcaatgtatgcaatgcaggctgctggtatttatactttaggttgcgtattgttggatcaagagcttcaagtcgctaaagaagaaagggaaacacctactactgatagtatgccgccattagtccgacaagctctggaattaaaggatcaccaaggtgcagagccagccttcttattcggccttgaattgatcatatgcggattagaaaaacaacttaaatgtgaaagtgggtcttaa

SEQ ID NO: 773 - DNA, 627 bp, Artificial Sequence
  Sulfonylurea responsive repressor
  misc_feature 166, 328, 329, 330, 394, 413: n = A,T,C or G
atgggatctagattagataaaagtaaagtgattaacagcgcattagagctgcttaatgaggtcggaatcgaaggtttaacaacccgtaaactcgcccagaagctaggtgtagagcagcctacattgtattggcatgtaaaaaataagcgagctctgctcgacgcantggccattgagatgctggataggcacgcgactcactattgccctttagaaggggaaagctggcaagattttttacgtaataacgctaaaagtatgagatgtgctttactaagtcatcgcgatggagcaaaagtatgtttaggtacaggctttacagaacagnnntatgaagctgccgaaaatagtatggcctttttatgccaacaaggtttttcactagagcacgcantgtatgcaatgcaggctgntggtatttatactttaggttgcgtattgttggatcaagagcttcaagtcgctaaagaagaaagggaaacacctactactgatagtatgccgccattagtccgacaagttctggaattaaaggatcaccaaggtgcagagccagccttcttattcggccttgaattgatcatatgcggattagaaaaacaacttaaatgtgaaagtgggtcttaa

SEQ ID NO: 774 - DNA, 627 bp, Artificial Sequence
  Sulfonylurea responsive repressor
  misc_feature 157, 159, 165, 166, 187, 189, 195, 238, 240, 257, 267, 291,297, 304, 318, 328, 329, 363, 388, 394, 414, 420, 423, 442,456, 504, 511, 521, 546, 573, 594: n = A,T,C or G
atgggatctagattagataaaagtaaagtgattaacagcgcattagagctgcttaatgaggtcggaatcgaaggtttaacaacccgtaaactcgcccagaagctaggtgtagagcagcctacattgtattggcatgtaaaaaataagcgagctctgntngacgcnntggccattgagatgctggatngncacgcnactcactattgccctttagaaggggaaagctggcaagattttntncgtaataacgctaaaantatgagatgngctttactaagtcatcgcgatggngcaaangtatgtntaggtacaggcttnacagaacagnngtatgaaactgccgaaaatagtctggcctttttntgccaacaaggtttttcactagagnacgcantgtatgcaatgcaggctgtnggtatntanactttaggttgcgtattgntggatcaagagctncaagtcgctaaagaagaaagggaaacacctactactgatagtatgccnccattantccgacaagntctggaattaaaggatcaccaaggngcagagccagccttcttattcggcctngaattgatcatatgcggattngaaaaacaacttaaatgtgaaagtgggtcttaa

SEQ ID NO: 775 - DNA, 627 bp, Artificial Sequence; identical to SEQ ID NO: 761
  Sulfonylurea responsive repressor

SEQ ID NO: 776 - DNA, 627 bp, Artificial Sequence
  Sulfonylurea responsive repressor
atgggatctagattagataaaagtaaagtgattaacagcgcattagagctgcttaatgaggtcggaatcgaaggtttaacaacccgtaaactcgcccagaagctaggtgtagagcagcctacattgtattggcatgtaaaaaataagcgagctctgctcgacgcaatggccattgagatgctggataggcacgcgactcactattgccctttagaaggggaaagctggcaagattttttacgtaataacgctaaaagtatgagatgtgctttactaagtcatcgcgatggagcaaaagtatgtttaggtacaggctttacagaacagcaatatgaagctgccgaaaatagtatggcctttttatgccaacaaggtttttcactagagcacgcactgtatgcaatgcaggctgcttgtatttatactttaggttgcgtattgttggatcaagagcttcaagtcgctaaagaagaaagggaaacacctactactgatagtatgccgccattagtccgacaagctctggaattaaaggatcaccaaggtgcagagccagccttcttattcggccttgaattgatcatatgcggattagaaaaacaacttaaatgtgaaagtgggtcttaa

SEQ ID NO: 777 - DNA, 627 bp, Artificial Sequence; identical to SEQ ID NO: 726
  Sulfonylurea responsive repressor

SEQ ID NO: 778 - DNA, 627 bp, Artificial Sequence
  Sulfonylurea responsive repressor
atgggatctagattagataaaagtaaagtgattaacagcgcattagagctgcttaatgaggtcggaatcgaaggtttaacaacccgtaaactcgcccagaagctaggtgtagagcagcctacattgtattggcatgtaaaaaataagcgagctctgctcgacgcaatggccattgagatgctggataggcacgcgactcactattgccctttagaaggggaaagctggcaagattttttacgtaataacgctaaaagtatgagatgtgctttactaagtcatcgcgatggagcaaaagtatgtttaggtacaggctttacagaacagcactatgaaagtgccgaaaatagtctggcctttttatgccaacaaggtttttcactagagcacgcaatgtatgcaatgcaggctgttggtatttatactttaggttgcgtattgttggatcaagagcttcaagtcgctaaagaagaaagggaaacacctactactgatagtatgccgccattagtccgacaagctctggaattaaaggatcaccaaggtgcagagccagccttcttattcggccttgaattgatcatatgcggattagaaaaacaacttaaatgtgaaagtgggtcttaa

SEQ ID NO: 779 - DNA, 627 bp, Artificial Sequence
  Sulfonylurea responsive repressor
  misc_feature 413: n = A,T,C or G
atgggatctagattagataaaagtaaagtgattaacagcgcattagagctgcttaatgaggtcggaatcgaaggtttaacaacccgtaaactcgcccagaagctaggtgtagagcagcctacattgtattggcatgtaaaaaataagcgagctctgctcgacgcaatggccattgagatgctggataggcacgcgactcactattgccctttagaaggggaaagctggcaagattttttacgtaataacgctaaaagtatgagatgtgctttactaagtcatcgcgatggagcaaaagtatgtttaggtacaggctttacagaacagcaatatgaagctgccgaaaatagtatggcctttttatgccaacaaggtttttcactagagcacgcaatgtatgcaatgcaggctgntggtatttatactttaggttgcgtattgttggatcaagagcttcaagtcgctaaagaagaaagggaaacacctactactgatagtatgccgccattagtccgacaagctctggaattaaaggatcaccaaggtgcagagccagccttcttattcggccttgaattgatcatatgcggattagaaaaacaacttaaatgtgaaagtgggtcttaa

SEQ ID NO: 780 - DNA, 627 bp, Artificial Sequence
  Sulfonylurea responsive repressor
atgggatctagattagataaaagtaaagtgattaacagcgcattagagctgcttaatgaggtcggaatcgaaggtttaacaacccgtaaactcgcccagaagctaggtgtagagcagcctacattgtattggcatgtaaaaaataagcgagctctgctcgacgcaatggccattgagatgctggataggcacgcgactcactattgccctttagaaggggaaagctggcaagattttttacgtaataacgctaaaagtatgagatgtgctttactaagtcatcgcgatggagcaaaagtatgtttaggtacaggctttacagaacagcaatatgaaactgccgaaaatagtatggcctttttatgccaacaaggtttttcactagagcacgcaatgtatgcaatgcaggctgctggtatttatactttaggttgcgtattgttggatcaagagcttcaagtcgctaaagaagaaagggaaacacctactactgatagtatgccgccattactccgacaagctctggaattaaaggatcaccaaggtgcagagccagccttcttattcggccttgaattgatcatatgcggattagaaaaacaacttaaatgtgaaagtgggtcttaa

SEQ ID NO: 781 - DNA, 627 bp, Artificial Sequence
  Sulfonylurea responsive repressor
atgggatctagattagataaaagtaaagtgattaacagcgcattagagctgcttaatgaggtcggaatcgaaggtttaacaacccgtaaactcgcccagaagctaggtgtagagcagcctacattgtattggcatgtaaaaaataagcgagctctgctcgacgcaatggccattgagatgctggataggcacgcgactcacttctgccctttagaaggggaaagctggcaagattttttacgtaataacgctaaaagtatgagatgtgctttactaagtcatcgcgatggagcaaaagtatgtttaggtacaggctttacagaacagcaatatgaaactgccgaaaatagtctggcctttttatgccaacaaggtttttcactagagaacgcactgtatgcaatgcaggctgcttgtatttatactttaggttgcgtattgttggatcaagagcttcaagtcgctaaagaagaaagggaaacacctactactgatagtatgccgccattagtccgacaagctctggaattaaaggatcaccaaggtgcagagccagccttcttattcggccttgaattgatcatatgcggattagaaaaacaacttaaatgtgaaagtgggtcttaa

SEQ ID NO: 782 - DNA, 627 bp, Artificial Sequence
  Sulfonylurea responsive repressor
atgggatctagattagataaaagtaaagtgattaacagcgcattagagctgcttaatgaggtcggaatcgaaggtttaacaacccgtaaactcgcccagaagctaggtgtagagcagcctacattgtattggcatgtaaaaaataagcgagctctgctcgacgcaatggccattgagatgctggataggcacgcgactcactattgccctttagaaggggaaagctggcaagattttttacgtaataacgctaaaagtatgagatgtgctttactaagtcatcgcgatggagcaaaagtatgtttaggtacaggctttacagaacagcaatatgaaagtgccgaaaatagtatggcctttttatgccaacaaggtttttcactagagaacgcaatgtatgcaatgcaggctgctggtatttatactttaggttgcgtattgttggatcaagagcttcaagtcgctaaagaagaaagggaaacacctactactgatagtatgccgccattagtccgacaaggtctggaattaaaggatcaccaaggtgcagagccagccttcttattcggccttgaattgatcatatgcggattagaaaaacaacttaaatgtgaaagtgggtcttaa

SEQ ID NO: 783 - DNA, 627 bp, Artificial Sequence
  Sulfonylurea responsive repressor
atgggatctagattagataaaagtaaagtgattaacagcgcattagagctgcttaatgaggtcggaatcgaaggtttaacaacccgtaaactcgcccagaagctaggtgtagagcagcctacattgtattggcatgtaaaaaataagcgagctctgctcgacgcaatggccattgagatgctggataggcacgcgactcacatgtgccctttagaaggggaaagctggcaagattttttacgtaataacgctaaaagtatgagatgtgctttactaagtcatcgcgatggagcaaaagtatgtttaggtacaggctttacagaacagcaatatgaaagtgccgaaaatagtatggcctttttatgccaacaaggtttttcactagagcacgcaatgtatgcaatgcaggctgctggtatttatactttaggttgcgtattgttggatcaagagcttcaagtcgctaaagaagaaagggaaacacctactactgatagtatgccgccattactccgacaagctctggaattaaaggatcaccaaggtgcagagccagccttcttattcggccttgaattgatcatatgcggattagaaaaacaacttaaatgtgaaagtgggtcttaa

SEQ ID NO: 784 - DNA, 627 bp, Artificial Sequence
  Sulfonylurea responsive repressor
  misc_feature 203, 338, 511, 521: n = A,T,C or G
atgggatctagattagataaaagtaaagtgattaacagcgcattagagctgcttaatgaggtcggaatcgaaggtttaacaacccgtaaactcgcccagaagctaggtgtagagcagcctacattgtattggcatgtaaaaaataagcgagctctgctcgacgcaatggccattgagatgctggataggcacgcgactcactnttgccctttagaaggggaaagctggcaagattttttacgtaataacgctaaaagtatgagatgtgctttactaagtcatcgcgatggagcaaaagtatgtttaggtacaggctttacagaacagcaatatgaaantgccgaaaatagtatggcctttttatgccaacaaggtttttcactagagaacgcaatgtatgcaatgcaggctgttggtatttatactttaggttgcgtattgttggatcaagagcttcaagtcgctaaagaagaaagggaaacacctactactgatagtatgccgccattantccgacaagntctggaattaaaggatcaccaaggtgcagagccagccttcttattcggccttgaattgatcatatgcggattagaaaaacaacttaaatgtgaaagtgggtcttaa

SEQ ID NO: 785 - DNA, 627 bp, Artificial Sequence
  Sulfonylurea responsive repressor
atgggatctagattagataaaagtaaagtgattaacagcgcattagagctgcttaatgaggtcggaatcgaaggtttaacaacccgtaaactcgcccagaagctaggtgtagagcagcctacattgtattggcatgtaaaaaataagcgagctctgctcgacgcattggccattgagatgctggataggcacgcgactcactattgccctttagaaggggaaagctggcaagattttttacgtaataacgctaaaagtatgagatgtgctttactaagtcatcgcgatggagcaaaagtatgtttaggtacaggctttacagaacagcactatgaagctgccgaaaatagtatggcctttttatgccaacaaggtttttcactagagaacgcaatgtatgcaatgcaggctgttggtatttttactttaggttgcgtattgttggatcaagagcttcaagtcgctaaagaagaaagggaaacacctactactgatagtatgccgccattagtccgacaagctctggaattaaaggatcaccaaggtgcagagccagccttcttattcggccttgaattgatcatatgcggattagaaaaacaacttaaatgtgaaagtgggtcttaa

SEQ ID NO: 786 - DNA, 627 bp, Artificial Sequence
  Sulfonylurea responsive repressor
atgggatctagattagataaaagtaaagtgattaacagcgcattagagctgcttaatgaggtcggaatcgaaggtttaacaacccgtaaactcgcccagaagctaggtgtagagcagcctacattgtattggcatgtaaaaaataagcgagctctgctcgacgcattggccattgagatgctggataggcacgcgactcactattgccctttagaaggggaaagctggcaagattttttacgtaataacgctaaaagtatgagatgtgctttactaagtcatcgcgatggagcaaaagtatgtttaggtacaggctttacagaacagatgtatgaaagtgccgaaaatagtatggcctttttatgccaacaaggtttttcactagagcacgcaatgtatgcaatgcaggctgctggtatttatactttaggttgcgtattgttggatcaagagcttcaagtcgctaaagaagaaagggaaacacctactactgatagtatgccgccattactccgacaagctctggaattaaaggatcaccaaggtgcagagccagccttcttattcggccttgaattgatcatatgcggattagaaaaacaacttaaatgtgaaagtgggtcttaa

SEQ ID NO: 787 - DNA, 627 bp, Artificial Sequence
  Sulfonylurea responsive repressor
  misc_feature 328, 329, 330, 338, 422, 512, 513: n = A,T,C or G
atgggatctagattagataaaagtaaagtgattaacagcgcattagagctgcttaatgaggtcggaatcgaaggtttaacaacccgtaaactcgcccagaagctaggtgtagagcagcctacattgtattggcatgtaaaaaataagcgagctctgctcgacgcaatggccattgagatgctggataggcacgcgactcactattgccctttagaaggggaaagctggcaagattttttacgtaataacgctaaaagtatgagatgtgctttactaagtcatcgcgatggagcaaaagtatgtttaggtacaggctttacagaacagnnntatgaaantgccgaaaatagtctggcctttttatgccaacaaggtttttcactagagcacgcactgtatgcaatgcaggctgcttgtatttntactttaggttgcgtattgttggatcaagagcttcaagtcgctaaagaagaaagggaaacacctactactgatagtatgccgccattagnncgacaaggtctggaattaaaggatcaccaaggtgcagagccagccttcttattcggccttgaattgatcatatgcggattagaaaaacaacttaaatgtgaaagtgggtcttaa

SEQ ID NO: 788 - DNA, 627 bp, Artificial Sequence
  Sulfonylurea responsive repressor
atgggatctagattagataaaagtaaagtgattaacagcgcattagagctgcttaatgaggtcggaatcgaaggtttaacaacccgtaaactcgcccagaagctaggtgtagagcagcctacattgtattggcatgtaaaaaataagcgagctctgctcgacgcaatggccattgagatgctggataggcacgcgactcactattgccctttagaaggggaaagctggcaagattttttacgtaataacgctaaaagtatgagatgtgctttactaagtcatcgcgatggagcaaaagtatgtttaggtacaggctttacagaacagcaatatgaaagtgccgaaaatagtatggcctttttatgccaacaaggtttttcactagagcacgcaatgtatgcaatgcaggctgttggtatttatactttaggttgcgtattgttggatcaagagcttcaagtcgctaaagaagaaagggaaacacctactactgatagtatgccgccattactccgacaagctctggaattaaaggatcaccaaggtgcagagccagccttcttattcggccttgaattgatcatatgcggattagaaaaacaacttaaatgtgaaagtgggtcttaa

SEQ ID NO: 789 - DNA, 627 bp, Artificial Sequence
  Sulfonylurea responsive repressor
atgggatctagattagataaaagtaaagtgattaacagcgcattagagctgcttaatgaggtcggaatcgaaggtttaacaacccgtaaactcgcccagaagctaggtgtagagcagcctacattgtattggcatgtaaaaaataagcgagctctgctcgacgcaatggccattgagatgctggataggcacgcgactcacgtctgccctttagaaggggaaagctggcaagattttttacgtaataacgctaaaagtatgagatgtgctttactaagtcatcgcgatggagcaaaagtatgtttaggtacaggctttacagaacagcactatgaaagtgccgaaaatagtctggcctttttatgccaacaaggtttttcactagagcacgcactgtatgcaatgcaggctgttggtatttatactttaggttgcgtattgttggatcaagagcttcaagtcgctaaagaagaaagggaaacacctactactgatagtatgccgccattagtccgacaagctctggaattaaaggatcaccaaggtgcagagccagccttcttattcggccttgaattgatcatatgcggattagaaaaacaacttaaatgtgaaagtgggtcttaa

SEQ ID NO: 790 - DNA, 627 bp, Artificial Sequence
  Sulfonylurea responsive repressor
atgggatctagattagataaaagtaaagtgattaacagcgcattagagctgcttaatgaggtcggaatcgaaggtttaacaacccgtaaactcgcccagaagctaggtgtagagcagcctacattgtattggcatgtaaaaaataagcgagctctgctcgacgcaatggccattgagatgctggataggcacgcgactcacttctgccctttagaaggggaaagctggcaagattttttacgtaataacgctaaaagtatgagatgtgctttactaagtcatcgcgatggagcaaaagtatgtttaggtacaggctttacagaacagcaatatgaaactgccgaaaatagtctggcctttttatgccaacaaggtttttcactagagaacgcaatgtatgcaatgcaggctgttggtatttatactttaggttgcgtattgttggatcaagagcttcaagtcgctaaagaagaaagggaaacacctactactgatagtatgccgccattagtccgacaaggtctggaattaaaggatcaccaaggtgcagagccagccttcttattcggccttgaattgatcatatgcggattagaaaaacaacttaaatgtgaaagtgggtcttaa

SEQ ID NO: 791 - DNA, 627 bp, Artificial Sequence
  Sulfonylurea responsive repressor
atgggatctagattagataaaagtaaagtgattaacagcgcattagagctgcttaatgaggtcggaatcgaaggtttaacaacccgtaaactcgcccagaagctaggtgtagagcagcctacattgtattggcatgtaaaaaataagcgagctctgctcgacgcaatggccattgagatgctggataggcacgcgactcactattgccctttagaaggggaaagctggcaagattttttacgtaataacgctaaaagtatgagatgtgctttactaagtcatcgcgatggagcaaaagtatgtttaggtacaggctttacagaacagcaatatgaaactgccgaaaatagtctggcctttttatgccaacaaggtttttcactagagaacgcactgtatgcaatgcaggctgcttgtatttatactttaggttgcgtattgttggatcaagagcttcaagtcgctaaagaagaaagggaaacacctactactgatagtatgccgccattagtccgacaagttctggaattaaaggatcaccaaggtgcagagccagccttcttattcggccttgaattgatcatatgcggattagaaaaacaacttaaatgtgaaagtgggtcttaa

SEQ ID NO: 792 - DNA, 627 bp, Artificial Sequence
  Sulfonylurea responsive repressor
atgggatctagattagataaargkrragkgattaacagcgcattagagctgcttaatgaggtcggaatcgaaggtttaacaacccgtaaactcgcccagaagctaggtgtagagcagcctacattgtattggcatgtaaaaaataagcgagctctgctcgacgcaatggccattgagatgctggataggcacgcgactcactattgccctttagaaggggaaagctggcaagattttttacgtaataacgctaaaagtatgagatgtgctttactaagtcatcgcgatggagcaaaagtatgtttaggtacaggctttacagaacagcaatatgatactgccgaaaatagtctggcctttttatgccaacaaggtttttcactagagaacgcactgtatgcaatgcaggctgttggtatttatactttaggttgcgtattgttggatcaagagcttcaagtcgctaaagaagaaagggaaacacctactactgatagtatgccgccattagtccgacaagttctggaattaaaggatcaccaaggtgcagagccagtcttcttattcggccttgaattgatcatatgcggattagaaaaacaacttaaatgtgaaagtgggtcttaa

SEQ ID NO: 793 - DNA, 627 bp, Artificial Sequence
  Sulfonylurea responsive repressor
atgggatctagattagataaaagtaaagtgattaacagcgcattagagctgcttaatgaggtcggaatcgaaggtttaacaacccgtaaactcgcccagaagctaggtgtagagcagcctacattgtattggcatgtaaaaaataagcgagctctgctcgacgcattggccattgagatgctggataggcacgcgactcactattgccctttagaaggggaaagctggcaagattttttacgtaataacgctttaagtatgagatgtgctttactaagtcatcgcgatggagcaaaagtatgtttaggtacaggctttacagaaaagcaatatgaaactgccgaaaatagtatggcctttttatgccaacaaggtttttcactagagcacgcaatgtatgcaatgcaggctgctggtatttatactttaggttgcgtattgttggatcaagagcttcaagtcgctaaagaagaaagggaaacacctactactgatagtatgccgccattagtccgacaagctctggaattaaaggatcaccaaggtgcagagccagccttcttattcggccttgaattgatcatatgcggattagaaaaacaacttaaatgtgaaagtgggtcttaa

SEQ ID NO: 794 - DNA, 627 bp, Artificial Sequence
  Sulfonylurea responsive repressor
atgggatctagattagataaaagtaaagtgattaacagcgcattagagctgcttaatgaggtcggaatcgaaggtttaacaacccgtaaactcgcccagaagctaggtgtagagcagcctacattgtattggcatgtaaaaaataagcgagctctgctcgacgcaatggccattgagatgctggataggcacgcgactcactattgccctttagaaggggaaagctggcaagattttttacgtaataacgctaaaagtatgagatgtgctttactaagtcatcgcgatggagcaaaagtatgtttaggtacaggctttacagaacagcaatatgaaactgccgaaaatagtctggcctttttatgccaacaaggtttttcactagagaacgcaatgtatgcaatgcaggctgttggtatttatactttaggttgcgtattgttggatcaagagcttcaagtcgctaaagaagaaagggaaacacctactactgatagtatgccgccattactccgacaagttctggaattaaaggatcaccaaggtgcagagccagccttcttattcggccttgaattgatcatatgcggattagaaaaacaacttaaatgtgaaagtgggtcttaa

SEQ ID NO: 795 - DNA, 627 bp, Artificial Sequence
  Sulfonylurea responsive repressor
atgggatctagattagatwaaagkrragtgattaacagcgcattagagctgcttaatgaggtcggaatcgaaggtttaacaacccgtaaactcgcccagaagctaggtgtagagcagcctacattgtattggcatgtaaaaaataagcgagctctgctcgacgcaatggccattgagatgctggataggcacgcgactcactattgccctttagaaggggaaagctggcaagattttttacgtaataacgctaaaagtatgagatgtgctttactaagtcatcgcgatggagcaaaagtatgtttaggtacaggctttacagaacagcaatatgaagctgccgaaaatagtatggcctttttatgccaacaaggtttttcactagagcacgcaatgtatgcaatgcaggctgcttgtatttatactttaggttgcgtattgttggatcaagagcttcaagtcgctaaagaagaaagggaaacacctactactgatagtatgccgccattagtccgacaagctctggaattaaaggatcaccaaggtgcagagccagccttcttattcggccttgaattgatcatatgcggattagaaaaacaacttaaatgtgaaagtgggtcttaa

SEQ ID NO: 796 - DNA, 627 bp, Artificial Sequence
  Sulfonylurea responsive repressor
  misc_feature 166, 330, 511: n = A,T,C or G
atgggatctagattagataaaagtaaagtgattaacagcgcattagagctgcttaatgaggtcggaatcgaaggtttaacaacccgtaaactcgcccagaagctaggtgtagagcagcctacattgtattggcatgtaaaaaataagcgagctctgctcgacgcantggccattgagatgctggataggcacgcgactcactattgccctttagaaggggaaagctggcaagattttttacgtaataacgctaaaagtatgagatgtgctttactaagtcatcgcgatggagcaaaagtatgtttaggtacaggctttacagaacagcantatgaaattgccgaaaatagtctggcctttttatgccaacaaggtttttcactagagcacgcaatgtatgcaatgcaggctgctggtatttatactttaggttgcgtattgttggatcaagagcttcaagtcgctaaagaagaaagggaaacacctactactgatagtatgccgccattantccgacaagctctggaattaaaggatcaccaaggtgcagagccagccttcttattcggccttgaattgatcatatgcggattagaaaaacaacttaaatgtgaaagtgggtcttaa

SEQ ID NO: 797 - DNA, 627 bp, Artificial Sequence
  Sulfonylurea responsive repressor
atgggatctagattagataaaagtaaagtgattaacagcgcattagagctgcttaatgaggtcggaatcgaaggtttaacaacccgtaaactcgcccagaagctaggtgtagagcagcctacattgtattggcatgtaaaaaataagcgagctctgctcgacgcattggccattgagatgctggataggcacgcgactcactattgccctttagaaggggaaagctggcaagattttttacgtaataacgctaaaagtatgagatgtgctttactaagtcatcgcgatggagcaaaagtatgtttaggtacaggctttacagaaaagcaatatgaagctgccgaaaatagtctggcctttttatgccaacaaggtttttcactagagcacgcactgtatgcaatgcaggctgttggtatttatactttaggttgcgtattgttggatcaagagcttcaagtcgctaaagaagaaagggaaacacctactactgatagtatgccgccattagtccgacaagttctggaattaaaggatcaccaaggtgcagagccagccttcttattcggccttgaattgatcatatgcggattagaaaaacaacttaaatgtgaaagtgggtcttaa

SEQ ID NO: 798 - DNA, 627 bp, Artificial Sequence
  Sulfonylurea responsive repressor
atgggatctagattagataaaagkrragkgattaacagcgcattagagctgcttawtgaggtcggaatcgaaggtttaacaacccgtaaactcgcccagaagctaggtgtagagcagcctacattgtattggcatgtaaaaaataagcgagctctgctcgacgcaatggccattgagatgctggataggcacgcgactcactattgccctttagaaggggaaagctggcaagattttttacgtaataacgctaaaagtatgagatgtgctttactaagtcatcgcgatggagcaaaagtatgtttaggtacaggctttacagaaaagctgtatgaaagtgccgaaaatagtctggcctttttatgccaacaaggtttttcactagagaacgcaatgtatgcaatgcaggctgtttgtatttttactttaggttgcgtattgttggatcaagagcttcaagtcgctaaagaagaaagggaaacacctactactgatagtatgccgccattactccgacaaggtctggaattaaaggatcaccaaggtgcagagccagccttcttattcggccttgaattgatcatatgcggattagaaaaacaacttaaatgtgaaagtgggtcttaa

SEQ ID NO: 799 - DNA, 627 bp, Artificial Sequence
  Sulfonylurea responsive repressor
atgggatctagattagataaaagtaaagtgattaacagcgcattagagctgcttaatgaggtcggaatcgaaggtttaacaacccgtaaactcgcccagaagctaggtgtagagcagcctacattgtattggcatgtaaaaaataagcgagctctgctcgacgcaatggccattgagatgctggataggcacgcgactcactattgccctttagaaggggaaagctggcaagattttttacgtaataacgctaaaagtatgagatgtgctttactaagtcatcgcgatggagcaaaagtatgtttaggtacaggctttacagaacagcaatatgaaagtgccgaaaatagtctggcctttttatgccaacaaggtttttcactagagcacgcaatgtatgcaatgcaggctgttggtatttttactttaggttgcgtattgttggatcaagagcttcaagtcgctaaagaagaaagggaaacacctactacagatagtatgccgccattactccgacaagctctggaattaaaggatcaccaaggtgcagagccagccttcttattcggccttgaattgatcatatgcggattagaaaaacaacttaaatgtgaaagtgggtcttaa

SEQ ID NO: 800 - DNA, 627 bp, Artificial Sequence
  Sulfonylurea responsive repressor
atgggatctagattagataaaagtaaagtgattaacagcgcattagagctgcttaatgaggtcggaatcgaaggtttaacaacccgtaaactcgcccagaagctaggtgtagagcagcctacattgtattggcatgtaaaaaataagcgagctctgctcgacgcattggccattgagatgctggataggcacgcgactcactattgccctttagaaggggaaagctggcaagattttttacgtaataacgctaaaagtatgagatgtgctttactaagtcatcgcgatggagcaaaagtatgtttaggtacaggctttacagaacagatgtatgaaggtgccgaaaatagtatggcctttttatgccaacaaggtttttcactagagcacgcaatgtatgcaatgcaggctgctggtatttatactttaggttgcgtattgttggatcaagagcttcaagtcgctaaagaagaaagggaaacacctactactgatagtatgccgccattagtccgacaagctctggaattaaaggatcaccaaggtgcagagccagccttcttattcggccttgaattgatcatatgcggattagaaaaacaacttaaatgtgaaagtgggtcttaa

SEQ ID NO: 801 - DNA, 627 bp, Artificial Sequence
  Sulfonylurea responsive repressor
  misc_feature 415: n = A,T,C or G
atgggatctagattagataaaagtrargkgattaacagcgcattagagctgcttaatgaggtcggaatcgaaggtttaacaacccgtaaactcgcccagaagctaggtgtagagcagcctacattgtattggcatgtaaaaaataagcgagctctgctcgacgcaatggccattgagatgctggataggcacgcgactcactattgccctttagaaggggaaagctggcaagattttttacgtaataacgctaaaagtatgagatgtgctttactaagtcatcgcgatggagcaaaagtatgtttaggttcaggctttacagaacagcaatatgaaactgccgaaaatagtatggcctttttatgccaacaaggtttttcactagagaacgcaatgtatgcaatgcaggctgctngtatttttactttaggttgcgtattgttggatcaagagcttcaagtcgctaaagaagaaagggaaacacctactactgatagtatgccgccattagtccgacaagttctggaattaaaggatcaccaaggtgcagagccagccttcttattcggccttgaattgatcatatgcggattagaaaaacaacttaaatgtgaaagtgggtcytaa

SEQ ID NO: 802 - DNA, 627 bp, Artificial Sequence
  Sulfonylurea responsive repressor
atgggatctagattagataaaagtaaagtgattaacagcgcattagagctgctymwtgaggwcggaatcgaaggtttaacaacccgtaaactcgcccagaagctaggtgtagagcagcctacattgtattggcatgtaaaaaataagcgagctctgctcgacgcaatggccattgagatgctggataggcacgcgactcacatctgccctttagaagaggaaagctggcaagattttttacgtaataacgctaaaagtatgagatgtgctttactaagtcatcgcgatggagcaaaagtatgtttaggtacaggctttacagaacagcaatatgaaactgccgaaaatagtatggcctttttatgtcaacaaggtttttcactagagcacgcaatgtatgcaatgcaggctgcttgtatttatactttaggttgcgtattgttggatcaagagcttcaagtcgctaaagaagaaagggaaacacctactactgatagtatgccgccattagtccgacaagttctggaattaaaggatcaccaaggtgcagagccagccttcttattcggccttgaattgatcatatgcggattagaaaaacaacttaaatgtgaaagtgggtcttaa

SEQ ID NO: 803 - DNA, 627 bp, Artificial Sequence
  Sulfonylurea responsive repressor
atgggatctagattagataaaagkrargkgattaacagcgcattagagctgcttaatgaggtcggaatcgaaggtttaacaacccgtaaactcgcccagaagctaggtgtagagcagcctacattgtattggcatgtaaaaaataagcgagctctgctcgacgcaatggccattgagatgctggataggcacgcgactcacgtctgccctttagaaggggaaagctggcaagattttttacgtaataacgctaaaagtatgagatgtgctttactaagtcatcgcgatggagcaaaagtatgtttaggtacaggctttacagaacagcaatatgaaagtgccgaaaatagtctggcctttttatgccaacaaggtttttcactagagcacgcaatgtatgcaatgcaggctgctggtatttttactttaggttgcgtattgttggatcaagagcttcaagtcgctaaagaagaaagggaaacacctactactgatagtatgccgccattagtccgacaagctctggaattaaaggatcaccaaggtgcagagccagccttcttattcggccttgaattgatcatatgcggattagaaaaacaacttaaatgtgaaagtgggtcttaa

SEQ ID NO: 804 - DNA, 627 bp, Artificial Sequence
  Sulfonylurea responsive repressor
atgggatctagattasmtwwaagtaaagtgattaacagcgcattagagctgcttaatgaggtcggaatcgaaggtttaacaacccgtaaactcgcccagaagctaggtgtagagcagcctacattgtattggcatgtaaaaaataagcgagctctgctcgacgcaatggccattgagatgctggataggcacgcgactcacatgtgccctttagaaggggaaagctggcaagattttttacgtaataacgctaaaagtatgagatgtgctttactaagtcatcgcgatggagcaaaagtatgtttaggtacaggctttacagaacagcactatgaaactgccgaaaatagtatggcctttttatgccaacaaggtttttcactagagaacgcaatgtatgcaatgcaggctgctggtatttatactttaggttgcgtattgttggatcaagagcttcaagtcgctaaagaagaaagggaaacacctactactgatagtatgccgccattagtccgacaagttctggaattaaaggatcaccaaggtgcagagccagccttcttattcggccttgaattgatcatatgcggattagaaaaacaacttaaatgtgaaagtgggtcttaa

SEQ ID NO: 805 - DNA, 627 bp, Artificial Sequence
  Sulfonylurea responsive repressor
atgggatctagattagataaaagtarrgtgattaacagcgcattagagctgcttawtgaggtcggaatcgaaggtttaacaacccgtaaactcgcccagaagctaggtgtagagcagcctacattgtattggcatgtaaaaaataagcgagctctgctcgacgcaatggccattgagatgctggataggcacgcgactcactattgccctttagaaggggaaagctggcaagattttttacgtaataacgctaaaagtatgagatgtgctttactaagtcatcgcgatggagcaaaagtatgtttaggtacaggctttacagaacagcaatatgaagctgccgaaaatagtctggcctttttatgccaacaaggtttttcactagagaacgcactgtatgcaatgcaggctgttggtatttttactttaggttgcgtattgttggatcaagagcttcaagtcgctaaagaagaaagggaaacacctactactgatagtatgccgccattagtccgacaaggtctggaattaaaggatcaccaaggtgcagagccagccttcttattcggccttgaattgatcatatgcggattagaaaaacaacttaaatgtgaaagtgggtcytaa

SEQ ID NO: 806 - DNA, 627 bp, Artificial Sequence
  Sulfonylurea responsive repressor
atgggatctagattagataaaagtaaagtgattaacagcgcattagagctgcttaatgaggtcggaatcgaaggtttaacaacccgtaaactcgcccagaagctaggtgtagagcagcctacattgtattggcatgtaaaaaataagcgagctctgctcgacgcaatggccattgagatgctggataggcacgcgactcactattgccctttagaaggggaaagctggcaagattttttacgtaataacgctaaaagtatgagatgtgctttactaagtcatcgcgatggagcaaaagtatgtttaggtacaggctttacagaacagcaatatgaaagtgccgaaaatagtctggcctttttatgccaacaaggtttttcactagagaacgcaatgtatgcaatgcaggctgctggtatttttactttaggttgcgtattgttggatcaagagcttcaagtcgctaaagaagaaagggaaacacctactactgatagtatgccgccattagtccgacaagctctggaattaaaggatcaccaaggtgcagagccagccttcttattcggccttgaattgatcatatgcggattagaaaaacaacttaaatgtgaaagtgggtcttaa

SEQ ID NO: 807 - DNA, 627 bp, Artificial Sequence
  Sulfonylurea responsive repressor
atgggatctagattagataaaagtaaagtgattaacagcgcattagagctgcttaatgaggtcggaatcgaaggtttaacaacccgtaaactcgcccagaagctaggtgtagagcagcctacattgtattggcatgtaaaaaataagcgagctctgctcgacgcaatggccattgagatgctggataggcacgcgactcacttctgccctttagaaggggaaagctggcaagattttttacgtaataacgctaaaagtatgagatgtgctttactaagtcatcgcgatggagcaaaagtatgtttaggtacaggctttacagaacagcactatgaaagtgccgaaaatagtctggcctttttatgccaacaaggtttttcactagagaacgcaatgtatgcaatgcaggctgttggtatttatactttaggttgcgtattgttggatcaagagcttcaagtcgctaaagaagaaagggaaacacctactactgatagtatgccgccattagtccgacaagttctggaattaaaggatcaccaaggtgcagagccagccttcttattcggccttgaattgatcatatgcggattagaaaaacaacttaaatgtgaaagtgggtcttaa

SEQ ID NO: 808 - DNA, 627 bp, Artificial Sequence
  Sulfonylurea responsive repressor
atgggatctagattasataaaagtaaagtgattaacagcgcattagagctgcttaatgaggtcggaatcgaaggtttaacaacccgtaaactcgcccagaagctaggtgtagagcagcctacattgtattggcatgtaaaaaataagcgagctctgctcgacgcaatggccattgagatgctggataggcacgcgactcacgtctgccctttagaaggggaaagctggcaagattttttacgtaataacgctaaaagtatgagatgtgctttactaagtcatcgcgatggagcaaaagtatgtttaggtacaggctttacagaacagcaatatgaaactgccgaaaatagtctggcctttttatgccaacaaggtttttcactagagcacgcactgtatgcaatgcaggctgttggtatttatactttaggttgcgtattgttggatcaagagcttcaagtcgctaaagaagaaagggaaacacctactactgatagtatgccgccattagtccgacaagttctggaattaaaggatcaccaaggtgcagagccagccttcttattcggccttgaattgatcatatgcggattagaaaaacaacttaaatgtgaaagtgggtcttaa

SEQ ID NO: 809 - DNA, 627 bp, Artificial Sequence
  Sulfonylurea responsive repressor
atgggatctagattmsmtwaaagtraagtgattaacagcgcattagagctgcttaatgaggtcggaatcgaaggtttaacaacccgtaaactcgcccagaagctaggtgtagagcagcctacattgtattggcatgtaaaaaataagcgagctctgctcgacgcattggccattgagatgctggataggcacgcgactcactattgccctttagaaggggaaagctggcaagattttttacgtaataacgctaaaagtatgagatgtgctttactaagtcatcgcgatggagcaaaagtatgtttaggtacaggctttacagaaaagcaatatgaagctgccgaaaatagtatggcctttttatgccaacaaggtttttcactagagcacgcactgtatgcaatgcaggctgttggtatttatactttaggttgcgtattgttggatcaagagcttcaagtcgctaaagaagaaagggaaacacctactactgatagtatgccgccattagtccgacaagctctggaattaaaggatcaccaaggtgcagagccagccttcttattcggccttgaattgatcatatgcggattagaaaaacaacttaaatgtgaaagtgggtcytaa

SEQ ID NO: 810 - DNA, 627 bp, Artificial Sequence
  Sulfonylurea responsive repressor
atgggatctagattagwtwaamgkrragygattaacagcgcattagagctgcttaatgaggtcggaatcgaaggtttaacaacccgtaaactcgcccagaagctaggtgtagagcagcctacattgtattggcatgtaaaaaataagcgagctctgctcgacgcaatggccattgagatgctggataggcacgcgactcactattgccctttagaaggggaaagctggcaagattttttacgtaataacgctaaaagtatgagatgtgctttactaagtcatcgcgatggagcaaaagtatgtttaggtacaggctttacagaacagcaatatgaaagtgccgaaaatagtatggcctttttatgccaacaaggtttttcactagagaacgcaatgtatgcaatgcaggctgctggtatttttactttaggttgcgtattgttggatcaagagcttcaagtcgctaaagaagaaagggaaacacctactactgatagtatgccgccattactccgacaagttctggaattaaaggatcaccaaggtgcagagccagccttcttattcggccttgaattgatcatatgcggattagaaaaacaacttaaatgtgaaagtgggtcyyma

SEQ ID NO: 811 - DNA, 627 bp, Artificial Sequence
  Sulfonylurea responsive repressor
atgggatctagattagatwaaagtarrgkgattaacagcgcattagagctgcttawtgaggtcggaatcgaaggtttaacaacccgtaaactcgcccagaagctaggtgtagagcagcctacattgtattggcatgtaaaaaataagcgagctctgctcgacgcaatggccattgagatgctggataggcacgcgactcacttctgccctttagaaggggaaagctggcaagattttttacgtaataacgctaaaagtatgagatgtgctttactaagtcatcgcgatggagcaaaagtatgtttaggtacaggctttacagaacagcaatatgaagctgccgaaaatagtatggcctttttatgccaacaaggtttttcactagagaacgcaatgtatgcaatgcaggctgttggtatttttactttaggttgcgtattgttggatcaagagcttcaagtcgctaaagaagaaagggaaacacctactactgatagtatgccgccattagtccgacaagttctggaattaaaggatcaccaaggtgcagagccagccttcttattcggccttgaattgatcatatgcggattagaaaaacaacttaaatgtgaaagtgggtcttaa

SEQ ID NO: 812 - DNA, 627 bp, Artificial Sequence
  Sulfonylurea responsive repressor
atgggatctagattasatwaaagtaaagtgattaacagcgcattagagctgcttaatgaggtcggaatcgaaggtttaacaacccgtaaactcgcccagaagctaggtgtagagcagcctacattgtattggcatgtaaaaaataagcgagctctgctcgacgcaatggccattgagatgctggataggcacgcgactcactattgccctttagaaggggaaagctggcaagattttttacgtaataacgctaaaagtatgagatgtgctttactaagtcatcgcgatggagcaaaagtatgtttaggtacaggctttacagaacagcaatatgaaactgccgaaaatagtatggcctttttatgccaacaaggtttttcactagagcacgcaatgtatgcaatgcaggctgttggtatttatactttaggttgcgtattgttggatcaagagcttcaagtcgctaaagaagaaagggaaacacctactactgatagtatgccgccattactccgacaagttctggaattaaaggatcaccaaggtgcagagccagccttcttattcggccttgaattgatcatatgcggattagaaaaacaacttaaatgtgaaagtgggtcttaa

SEQ ID NO: 813 - DNA, 627 bp, Artificial Sequence
  Sulfonylurea responsive repressor
atgggatctagattagataaaagtaaagtgattaacagcgcattagagctgcttaatgaggtcggaatcgaaggtttaacaacccgtaaactcgcccagaagctaggtgtagagcagcctacattgtattggcatgtaaaaaataagcgagctctgctcgacgcaatggccatggagatgctggataggcacgcgactcactattgccctttagaaggggaaagctggcaagattttttacgtaataacgctaaaagtatgagatgtgctttactaagtcatcgcgatggagcaaaagtatgtttaggtacaggctttacagaacagcaatatgaaagtgccgaaaatagtatggcctttttatgccaacaaggtttttcactagagaacgcactgtatgcaatgcaggctgttggtatttatactttaggttgcgtattgttggatcaagagcttcaagtcgctaaagaagaaagggaaacacctactactgatagtatgccgccattagtccgacaaggtctggaattaaaggatcaccaaggtgcagagccagccttcttattcggccttgaattgatcatatgcggattagaaaaacaacttaaatgtgaaagtgggtcttaa

SEQ ID NO: 814 - DNA, 627 bp, Artificial Sequence
  Sulfonylurea responsive repressor
  misc_feature 536: n = A,T,C or G
atgggatctagattagataaaagtaaagtgattaacagcgcattagagctgcttaatgaggtcggaatcgaaggtttaacaacccgtaaactcgcccagaagctaggtgtagagcagcctacattgtattggcatgtaaaaaataagcgagctctgctcgacgcattggccattgagatgctggataggcacgcgactcactattgccctttagaaggggaaagctggcaagattttttacgtaataacgctaaaagtatgagatgtgctttactaagtcatcgcgatggagcaaaagtatgtttaggtacaggctttacagaacagcaatatgaagctgccgaaaatagtctggcctttttatgccaacaaggtttttcactagagcacgcactgtatgcaatgcaggctgctggtatttatactttaggttgcgtattgttggatcaagagcttcaagtcgctaaagaagaaagggaaacacctactactgatagtatgccgccattactccgacaaggtctggaattaaaggntcaccaaggtgcagagccagccttcttattcggccttgaattgatcatatgcggattagaaaaacaacttaaatgtgaaagtgggtcttaa

SEQ ID NO: 815 - DNA, 627 bp, Artificial Sequence
  Sulfonylurea responsive repressor
atgggatctagattmsmtwwaagkraagtgattaacagcgcattagagctgcttaatgaggtcggaatcgaaggtttaacaacccgtaaactcgcccagaagctaggtgtagagcagcctacattgtattggcatgtaaaaaataagcgagctctgctcgacgcaatggccattgagatgctggataggcacgcgactcactattgccctttagaaggggaaagctggcaagattttttacgtaataacgctaaaagtatgagatgtgctttactaagtcatcgcgatggagcaaaagtatgtttaggtacaggctttacagaacagcaatatgaaactgccgaaaatagtctggcctttttatgccaacaaggtttttcactagagaacgcaatgtatgcaatgcaggctgctggtatttatactttaggttgcgtattgttggatcaagagcttcaagtcgctaaagaagaaagggaaacacctactactgatagtatgccgccattactccgacaagttctggaattaaaggatcaccaaggtgcagagccagccttcttattcggccttgaattgatcatatgcggattagaaaaacaacttaaatgtgaaagtgggtcytaa

SEQ ID NO: 816 - DNA, 627 bp, Artificial Sequence; identical to SEQ ID NO: 718
  Sulfonylurea responsive repressor

SEQ ID NO: 817 - DNA, 627 bp, Artificial Sequence
  Sulfonylurea responsive repressor
atgggatctagattagataaaagtaaagtgattaacagcgcattagagctgcttaatgaggtcggaatcgaaggtttaacaacccgtaaactcgcccagaagctaggtgtagagcagcctacattgtattggcatgtaaaaaataagcgagctctgctcgacgcaatggccattgagatgctggataggcacgcgactcactattgccctttagaaggggaaagctggcaagattttttacgtaataacgctaaaagtatgagatgtgctttactaagtcatcgcgatggagcaaaagtatgtttaggtacaggctttacagaacagcaatatgaaactgccgaaaatagtatggcctttttatgccaacaaggtttttcactagagaacgcactgtatgcaatgcaggctgctggtatttttactttaggttgcgtattgttggatcaagagcttcaagtcgctaaagaagaaagggaaacacctactactgatagtatgccgccattagtccgacaagttctggaattaaaggatcaccaaggtgcagagccagccttcttattcggccttgaattgatcatatgcggattagaaaaacaacttaaatgtgaaagtgggtcttaa

SEQ ID NO: 818 - DNA, 627 bp, Artificial Sequence
  Sulfonylurea responsive repressor
atgggatctagattagataaaagtaaagtgattaacagcgcattagagctgcttaatgaggtcggaatcgaaggtttaacaacccgtaaactcgcccagaagctaggtgtagagcagcctacattgtattggcatgtaaaaaataagcgagctctgctcgacgcaatggccattgagatgctggataggcacgcgactcacatctgccctttagaaggggaaagctggcaagattttttacgtaataacgctaaaagtatgagatgtgctttactaagtcatcgcgatggagcaaaagtatgtttaggtacaggctttacagaacagcaatatgaaactgccgaaaatagtatggcctttttatgccaacaaggtttttcactagagaacgcaatgtatgcaatgcaggctgtttgtatttatactttaggttgcgtattgttggatcaagagcttcaagtcgctaaagaagaaagggaaacacctactactgatagtatgccgccattagtccgacaagctctggaattaaaggatcaccaaggtgcagagccagccttcttattcggccttgaattgatcatatgcggattagaaaaacaacttaaatgtgaaagtgggtcttaa

SEQ ID NO: 819 - DNA, 624 bp, Artificial Sequence
  Sulfonylurea responsive repressor
atgggatctagattagataaaagtaaagtgattaacagcgcattagagctgcttaatgaggtcggaatcgaaggtttaacaacccgtaaactcgcccagaagctaggtgtagagcagcctacattgtattggcatgtaaaaaataagcgagctctgctcgacgccttagccattgagatgatggataggcaccaaactcacttgtgccctttagaaggggaaagctggcaagattttttacgtaataatgctaaaagtatgagatgtgctttactaagccatcgcgatggagcaaaagtatgtttaggtacacgctggacagaacaaatgtatgaagctgctgaaaatatgttagcctttttatgccaacaaggtttttcactagagaatgcattatatgcagtgagtgctgtgagggtgtttactttaggttgcgtattgtttgatcaagagagccaagtcgctaaagaagaaagggaaacacctactactgctagtatgccgccattagtgcgacaagcttgggaattaaaggatcaccaaggtgcagagccagccttcttattcggccttgaattgatcatatgcggattagaaaaacaacttaaatgcgaaagtgggtct

SEQ ID NO: 820 - DNA, 624 bp, Artificial Sequence
  Sulfonylurea responsive repressor
atgggatctagattagataaaagtaaagtgattaacagcgcattagagctgcttawtgaggtcggaatcgaaggtttaacaacccgtaaactcgcccagaagctaggtgtagagcagcctacattgtattggcatgtaaaaaataagcgagctctgctcgacgcaatggccattgagatgctggataggcacgcgactcactattgccctttagaaggggaaagctggcaagattttttacgtaataacgctaaaagtatgagatgtgctttactaagtcatcgcgatggagcaaaagtatgtttaggtacaggctttacagaacagcaatatgaagctgccgaaaatagtctggcctttttatgccaacaaggtttttcactagagaacgcactgtatgcaatgcaggctgttggtatttttactttaggttgcgtattgttggatcaagagcttcaagtcgctaaagaagaaagggaaacacctactactgatagtatgccgccattagtccgacaaggtctggaattaaaggatcaccaaggtgcagagccagccttcttattcggccttgaattgatcatatgcggattagaaaaacaacttaaatgtgaaagtgggtct

SEQ ID NO: 821 - DNA, 621 bp, Artificial Sequence
  Sulfonylurea responsive repressor
atggccagactcgacaagagcaaggtgatcaacagcgcactggagctgctgaacgaggtcggaatcgaaggcctcacaacccgtaagctcgcccagaagctcggggttgagcagcctacattgtactggcacgtcaagaacaagcgagctctgctagacgctatggccattgagatgctcgatcgccacgctccccacttgagtctcttggaaggggaaagctggcaagacttcttgaggaacaacgctaagtccatgagaaacgctttgctcagtcaccgtgatggagccaaggtctgtctaggtacgggcttcacggagcaaaactatgaaactgctgagaacagccttgccttcctgacacaacaaggtttctcccttgagaacgccctctacgcatggcaagcactggggatctacactctgggttgcgcgttgctggatcaagagctgcaagtcgctaaggaggagagggaaacacctactactgatagtatgccgccactggttcgacaagctctggaactcaaggatcaccaaggtgcagagccagccttcctgttcggccttgaactgatcatagcaggattggagaagcagctgaaggccgaaagtgggtct

SEQ ID NO: 822 - DNA, 621 bp, Artificial Sequence
  Sulfonylurea responsive repressor
atggccagactcgacaagagcaaggtgatcaacagcgcactggagctgctgaacgaggtcggaatcgaaggcctcacaacccgtaagctcgcccagaagctcggggttgagcagcctacattgtactggcacgtcaagaacaagcgagctctgctagacgctatggccattgagatgttcgataggcacaagacccactactgtcctttggaaggggaaagctggcaagacttcttgaggaacagggctaagtccatgagaaatgctttgctcagtcaccgtgatggagccaaggtcgctctaggtacgggcttcacggagcaacagtatgaaactatggagaactgtcttgccttcctgacacaacaaggtttctcccttgagaacgccctctacgcaatgcaagctgttgggatctacactctgggttgcgtcttgctggatcaagagctgcaagtcgctaaggaggagagggaaacacctactactgatagtatgccgccactggttcgacaagcttacgaactcagagatcaccaaggtgcagagccagccttcctgttcggccttgaactgatcataagtggattggagaagcagctgaaggcagaaagtgggtct

SEQ ID NO: 823 - DNA, 621 bp, Artificial Sequence
  Sulfonylurea responsive repressor
atggccagactcgacaagagcaaggtgatcaacagcgcactggagctgctgaacgaggtcggaatcgaaggcctcacaacccgtaagctcgcccagaagctcggggttgagcagcctacattgtactggcacgtcaagaacaagcgagctctgctagacgctatggccttcgagatgctcgatcgccacgctatacactttttaccattggaaggggcaagctggcaaaatttcttgaggaacaccgctaagtccatgagaaacgctttgctcagtcaccgtgatggagccaaggtctgtctaggtacgggcttcacggagcgacaatatgaaactgcggagaaccgccttgccttcctgacacaacaaggtttctcccttgagcaggccctctacgcatggcaagcagtggggatctacactctgggttgtgtcttgctggatcaagagctgcaagtcgctaaggaggagagggaaacacctactactgatagtatgccgccactggttcgacaagcttgggaactcaaggatcaccaaggtgcagagccagccttcctgttcggccttgaactgatcatatcaggattggagaagcagctgaaggcagaaagtgggtct

SEQ ID NO: 824 - DNA, 621 bp, Artificial Sequence
  Sulfonylurea responsive repressor
atggccagactcgacaagagcaaggtgatcaacagcgcactggagctgctgaacgaggtcggaatcgaaggcctcacaacccgtaagctcgcccagaagctcggggttgagcagcctacattgtactggcacgtcaagaacaagcgagctctgctagacgctatggccattgagatgctcgatcgccacgctatacacttgttacccttggaaggggaaagctggcaagacttcttgaggaacaacgctaagtccatgagatgcgctttgctcagtcaccgtgatggagccaaggtctgtctaggtacgggcttcacggagcaacaatatgaaactgcggagaaccgccttgccttcctgacacaacaaggtttctcccttgagaacgccctctacgcatggcaagcagtggggatctacactctgggttgtgtcttgctggatcaagagctgcaagtcgctaaggaggagagggaaacacctactactgatagtatgccgccactggttcgacaagctctggaactcaaggatcaccaaggtgcagagccagccttcctgttcggccttgaactgatcataggcggattggagaagcagctgaagagtgaaagtgggtct

SEQ ID NO: 825 - DNA, 621 bp, Artificial Sequence
  Sulfonylurea responsive repressor
atggccagactcgacaagagcaaggtgatcaacagcgcactggagctgctgaacgaggtcggaatcgaaggcctcacaacccgtaaactcgcccagaagctcggggtagagcagcctacattgtattggcacgtcaagaacaagcgagctctgctagacgctatggccattgagatgctcgataggcacgctacccacgtgtgccctttggaaggggaaagctggcaagacttcttgaggaacaacgctaagatcatgagatgtgctttgctcagtcaccgtgatggagccaaggtctgtctaggtacaggcttcacggagcaacagtatgaaactgctgagaacagccttgccttcctgtgccaacaaggtttctcccttgagcatgccctctacgcaatgcaggctgctgggatcttcactctgggttgcgtattgctggatcaagagctgcaagtcgctaaggaggagagggaaacacctactactgatagtatgccgccactggttcgacaagctctggaactcaacgatcaccaaggtgcagagccagccttcctgttcggccttgaattgatcatatgcggattggagaagcagctgaagtgtgaaagtgggtct

SEQ ID NO: 826 - DNA, 621 bp, Artificial Sequence
  Sulfonylurea responsive repressor
atggccagactcgacaagagcaaggtgatcaacagcgcactggagctgctgaacgaggtcggaatcgaaggcctcacaacccgtaaactcgcccagaagctcggggtagagcagcctacattgtattggcacgtcaagaacaagcgagctctgctagacgctatggccattgagatgctcgataggcacgctacccactactgccctttggaaggggaaagctggcaagacttcttgaggaacaacgctaagtccatgagatgtgctttgctcagtcaccgtgatggagccaaggtctgtctaggtacaggcttcacggagcaacagtatgaaactgctgagaacagccttgccttcctgtgccaacaaggtttctcccttgagaacgccctctacgcaatgcaggctgttgggatctatactctgggttgcgtattgctggatcaagagctgcaagtcgctaaggaggagagggaaacacctactactgatagtatgccgccactggttcgacaagctctggaactcaaggatcaccaaggtgcagagccagccttcctgttcggccttgaattgatcatatgcggattggagaagcagctgaagtgtgaaagtgggtct

SEQ ID NO: 827 - DNA, 621 bp, Artificial Sequence
  Sulfonylurea responsive repressor
atggccagactcgacaagagcaaggtgatcaacagcgcactggagctgctgaacgaggtcggaatcgaaggcctcacaacccgtaaactcgcccagaagctcggggtagagcagcctacattgtattggcacgtcaagaacaagcgagctctgctagacgctatggccattgagatgctcgataggcacgctacccactactgccctttggaaggggaaagctggcaagacttcttgaggaacaacgctaagtccatgagatgtgctttgctcagtcaccgtgatggagccaaggtctgtctaggtacaggcttcacggagcaacagtatgaaactgctgagaacagcatggccttcctgtgccaacaaggtttctcccttgagaacgccctctacgcaatgcaggctgttgggatctatactctgggttgcgtattgctggatcaagagctgcaagtcgctaaggaggagagggaaacacctactactgatagtatgccgccactggttcgacaagctctggaactcaaggatcaccaaggtgcagagccagccttcctgttcggccttgaattgatcatatgcggattggagaagcagctgaagtgtgaaagtgggtct

SEQ ID NO: 828 - DNA, 621 bp, Artificial Sequence
  Sulfonylurea responsive repressor
atggccagactcgacaagagcaaggtgatcaacagcgcactggagctgctgaacgaggtcggaatcgaaggcctcacaacccgtaaactcgcccagaagctcggggtagagcagcctacattgtattggcacgtcaagaacaagcgagctctgctagacgctatggccattgagatgctcgataggcacgctacccactactgccctttggaaggggaaagctggcaagacttcttgaggaacaacgctaagtccatgagatgtgctttgctcagtcaccgtgatggagccaaggtctgtctaggtacaggcttcacggagcaacagtatgaaactgctgagaacagccttgccttcctgtgccaacaaggtttctcccttgagcatgccatgtacgcaatgcaggctgctgggatctatactctgggttgcgtattgctggatcaagagctgcaagtcgctaaggaggagagggaaacacctactactgatagtatgccgccactggttcgacaagctctggaactcaaggatcaccaaggtgcagagccagccttcctgttcggccttgaattgatcatatgcggattggagaagcagctgaagtgtgaaagtgggtct

SEQ ID NO: 829 - DNA, 627 bp, Artificial Sequence
  reverse Sulfonylurea responsive repressor
atgggatctagattagataaaagtaaagtgattaacagcgcattagagctgcttaatgaggtcggaatcgaaggtttaacaacccgtaaactcgcccagaagctaggtgtagagcagcctacattgtattggcatgtaaaaaataagcgagctctgctcgacgccttagccattgagatgctggataggcacctgactcacttttgccctttagaaggggaaagctggcaagattttttacgtaataacgctaaaagtatgagatgtgctttactaagtcatcgcgatggagcaaaagtatggttaggtacaggctttacagaaaaacagtatgaaactaaggaaaatcggttagcctttttatgccaacaaggtttttcactagagaatgcattatatgcaatccgcgctgtgtcgcgttttactttaggttgcgtattgcaggatcaagagcctcaagtcgctaaagaagaaagggaaacacctactactgatagtatgccgccattattacgacaagctgtggaattatttgatcaccaaggtgcagagccagccttcttattcggccttgaattgatcatatgcggattagaaaaacaacttaaatgtgaaagtgagtcttaa

SEQ ID NO: 830 - DNA, 627 bp, Artificial Sequence
  reverse Sulfonylurea responsive repressor
atgggatctagattagataaaagtaaagtgattaacagcgcattagagctgcttaatgaggtcggaatcgaaggtttaacaacccgtaaactcgcccagaagctaggtgtagagcagcctacattgtattggcatgtaaaaaataagcgagctctgctcgacgccttagccattgagatgctggataggcacgcgactcacttttgccctttagaaggggaaagctggcaagattttttacgtaataacgctaaaagttttagatgtgctttactaagtcatcgcgatggagcaaaagtatgtttaggtacagcgggtacagaaaaacagtatgaaactctcgaaaattgtttagcctttttatgccaacaaggtttttcactagagaatgcattatatgcaaggagcgctgtggtgtgttttactttaggttgcgtattgtttgatcaagagatgcaagtcgctaaagaagaaagggaaacacctactactgatagtatgccgccattattacgacaagctgcggaattactggatcaccaaggtgcagagccagccttcttattcggccttgaattgatcatatgcggattagaaaaacaacttaaatgtgaaagtgggtcttaa

SEQ ID NO: 831 - DNA, 627 bp, Artificial Sequence
  reverse Sulfonylurea responsive repressor
atgggatctagattagataaaagtaaagtgattaacagcgcattagagctgcttaatgaggtcggaatcgaaggtttaacaacccgtaaactcgcccagaagctaggtgtagagcagcctacattgtattggcatgtaaaaaataagcgagctctgctcgacgccttagccattgagatgctggataggcacgcgactcacttttgccctttagaaggggaaagctggcaagattttttacgtaatactgctaaaagtatgagatgtgctttactaagtcatcgcgatggagcaaaagtacttttaggtacagcgactacagaaaaacagtatgaaactctcgaaaatttgttagcctttttataccaacaaggtttttcactagagaatgcattatatgcatggcaggctgtgtggcgttttactttaggttgcgtattgattgatcaagagacgcaagtcgctaaagaagaaagggaaacacctactactgatagtatgccgccattattacgacaagctgtggaattaaaggatcaccaaggtgcagagccagccttcttattcggccttgaattgatcatatgcggattagaaaaacaacttaaatgtgaaactgggtcttaa

SEQ ID NO: 832 - DNA, 627 bp, Artificial Sequence
  reverse Sulfonylurea responsive repressor
atgggatctagattagataaaagtaaagtgattaacagcgcattagagctgcttaatgaggtcggaatcgaaggtttaacaacccgtaaactcgcccagaagctaggtgtagagcagcctacattgtattggcatgtaaaaaataagcgagctctgctcgacgccttagccattgagatgctggataggcacgcgactcacttttgccctttagaaggggaaagctggcaagattttttacgtaataacgctaaaagtatgagatgtgctttactaagtcatcgcgatggagcaaaagtacagttaggtacagcggcgacagaaaaacagtatgaaactctggaaaataagttagcctttttatgccaacaaggtttttcactagagaatgcattatatgcacacagcgctgtgactcagtttactttaggttgcgtattgcgggatcaagagggtcaagtcgctaaagaagaaagggaaacacctactactgatagtatgccgccattattacgacaagctcgggaattacgtgatcaccaaggtgcagagccagccttcttattcggccttgaattgatcatatgcggattagaaaaacaacttaaatgtgaaagtgggtcttaa

SEQ ID NO: 833 - DNA, 627 bp, Artificial Sequence
  reverse Sulfonylurea responsive repressor
atgggatctagattagataaaagtaaagtgattaacagcgcattagagctgcttaatgaggtcggaatcgaaggtttaacaacccgtaaactcgcccagaagctaggtgtagagcagcctacattgtattggcatgtaaaaaataagcgagctctgctcgacgccttagccattgagatggcggataggcacaatactcacttttgccctttagaaggggaaagctggcaagattttttacgtaatgctgctagaagtatgagatgtgctttactaagtcatcgcgatggagccaaagtatatttaggtacagcgaggacagaaaaacagtatgaaactaccgaaaatgttttagcctttttatgccaacaaggtttttcactagagaatgcattatatgcagtgcgcgctgtgcctcgttttactttaggttgcgtattgttggatcaagagaggcaagtcgctaaagaagaaagggaaacacctactactgatagtatgccgccattattacgacaagctagggaattaacggatcaccaaggtgcagagccagccttcttattcggccttgaattgatcatatgcggattagaaaaacaacttaaatgtgaaagtgggtcttaa

SEQ ID NO: 834 - DNA, 627 bp, Artificial Sequence
  reverse Sulfonylurea responsive repressor
atgggatctagattagataaaagtaaagtgattaacagcgcattagagctgcttaatgaggtcggaatcgaaggtttaacaacccgtaaactcgcccagaagctaggtgtagagcagcctacattgtattggcatgtaaaaaataagcgagctctgctcgacgccttagccattgagatggcggataggcaccatactcacttttgccctttagaaggggaaagctggcaagattttttacgtaatgctgctaaaagtatgagatgtgctttactaagtcatcgcgatggagcaaaagtacgtttaggtacagcgtggacagaaaaacagtatgaaactcacgaaaatgtgttagcctttttatgccaacaaggtttttcactagagaatgcattatatgcactgaaggctgtgtcagggtttactttaggttgcgtattgaaggatcaagagatgcaagtcgctaaagaagaaagggaaacacctactactgatagtatgccgccattattacgacaagctactgaattagttgatcaccaaggtgcagagccagccttcttattcggccttgaattgatcatatgcggattagaaaaacaacttaaatgtgaaagtgggtcttaa

SEQ ID NO: 835 - DNA, 627 bp, Artificial Sequence
  reverse Sulfonylurea responsive repressor
atgggatctagattagataaaagtaaagtgattaacagcgcattagagctgcttaatgaggtcggaatcgaaggtttaacaacccgtaaactcgcccagaagctaggtgtagagcagcctacattgtattggcatgtaaaaaataagcgagctctgctcgacgccttagccattgagatgatggataggcaccagactcacttttgccctttagaaggggaaagctggcaagattttttacgtaatactgctaaaagttatagatgtgctttactaagtcatcgcgatggagcaaaagtaattttaggtacacgctggacagaaaaacagtatgaaactcgcgaaaatgttttagcctttttatgccaacaaggtttttcactagagaatgcattatatgcatgggccgctgtgggtccgtttactttaggttgcgtattgcgtgatcaagagcggcaagtcgctaaagaagaaagggaaacacctactactgatagtatgccgccattattacgacaagctttggaattaatggatcaccaaggtgcagagccagccttcttattcggccttgaattgatcatatgcggattagaaaaacaacttaaatgtgaaagtgggtcttaa

SEQ ID NO: 836 - DNA, 627 bp, Artificial Sequence
  reverse Sulfonylurea responsive repressor
atgggatctagattagataaaagtaaagtgattaacagcgcattagagctgcttaatgaggtcggaatcgaaggtttaacaacccgtaaactcgcccagaagctaggtgtagagcagcctacattgtattggcatgtaaaaaataagcgagctctgctcgacgccttagccattgagatgctggataggaaccagactcacttttgccctttagaaggggaaagctggcaagattttttacgtaataacgctaaaagttggagatgtgctttactaagtcatcgcgatggagcaaaagtaatgttaggtacacgcaatacagaaaaacagtatgaaactgccgaaaatgggttagcctttttatgccaacaaggtttttcactagagaatgcattatatgcatgccgcgctgtgtggacgtttactttaggttgcgtattggatgatcaagagacgcaagtcgctaaagaagaaagggaaacacctactagtgatagtatgccgccattattacgacaagctatggaattaaaggatcaccaaggtgcagagccagccttcttattcggccttgaattgatcatatgcggattagaaaaacaacttaaatgtgaaagtgggtcttaa

SEQ ID NO: 837 - DNA, 48 bp, Artificial Sequence
  Oligo tetO1
cctaatttttgttgacactctatcattgatagagttattttaccactc

SEQ ID NO: 838 - DNA, 48 bp, Artificial Sequence
  Oligo tetO2
ggattaaaaacaactgtgagatagtaactatctcaataaaatggtgag

SEQ ID NO: 839 - DNA, 48 bp, Artificial Sequence
  Oligo control
cctaatttttgttgactgtgttagtccatagctggtattttaccactc

SEQ ID NO: 840 - DNA, 48 bp, Artificial Sequence
  Oligo Control Complement
ggattaaaaacaactgacacaatcaggtatcgaccataaaatggtgag

SEQ ID NO: 841 - DNA, 8131 bp, Artificial Sequence
  PHP37586A
cgcgccggtacccgggtaccgagctcactagacgcggtgaaattacctaattaacaccggtgtttatcaaacaagtttgtacaaaaaagcaggctccggccagaatggcccggaccgggttaccgaattctagaaatccgtcaacatggtggagcacgacactctcgtctactccaagaatatcaaagatacagtctcagaagaccaaagggctattgagacttttcaacaaagggtaatatcgggaaacctcctcggattccattgcccagctatctgtcacttcatcaaaaggacagtagaaaaggaaggtggcacctacaaatgccatcattgcgataaaggaaaggctatcgttcaagatgcctctgccgacagtggtcccaaagatggacccccacccacgaggagcatcgtggaaaaagaagacgttccaaccacgtcttcaaagcaagtggattgatgtgatatctccactgacgtaagggatgacgcacaatcccactagactctatcagtgatagagtgtatataagactctatcagtgatagagtgaactctatcagtgatagagttgtacttatttttacaacaattaccaacaacaacaaacaacaaacaacattacaattactatttacaattacagtcgacccgggatccatggcctcctccgaggacgtcatcaaggagttcatgcgcttcaaggtgcgcatggagggctccgtgaacggccacgagttcgagatcgagggcgagggcgagggccgcccctacgagggcacccagaccgccaagctgaaggtgaccaagggcggccccctgcccttcgcctgggacatcctgtccccccagttccagtacggctccaaggtgtacgtgaagcaccccgccgacatccccgactacaagaagctgtccttccccgagggcttcaagtgggagcgcgtgatgaacttcgaggacggcggcgtggtgaccgtgacccaggactcctccctgcaggacggctccttcatctacaaggtgaagttcatcggcgtgaacttcccctccgacggccccgtaatgcagaagaagactatgggctgggaggcctccaccgagcgcctgtacccccgcgacggcgtgctgaagggcgagatccacaaggccctgaagctgaaggacggcggccactacctggtggagttcaagtccatctacatggccaagaagcccgtgcagctgcccggctactactacgtggactccaagctggacatcacctcccacaacgaggactacaccatcgtggagcagtacgagcgcgccgagggccgccaccacctgttcctgtagcggccccgctgaaatcaccagtctctctctacaaatctatctctctctataataatgtgtgagtagttcccagataagggaattagggttcttatagggtttcgctcatgtgttgagcatataagaaacccttagtatgtatttgtatttgtaaaatacttctatcaataaaatttctaattcctaaaaccaaaatccagtggcgagctcgagggtttacttattttgtgggtatctatacttttattagatttttaatcaggctcctgatttctttttatttcgattgaattcctgaacttgtattattcagtagatcgaataaattataaaaagataaaatcataaaataatattttatcctatcaatcatattaaagcaatgaatatgtaaaattaatcttatctttattttaaaaaatcatataggtttagtatttttttaaaaataaagataggattagttttactattcactgcttattacttttaaaaaaatcataaaggtttagtatttttttaaaataaatataggaatagttttactattcactgctttaatagaaaaatagtttaaaatttaagatagttttaatcccagcatttgccacgtttgaacgtgagccgaaacgatgtcgttacattatcttaacctagctgaaacgatgtcgtcataatatcgccaaatgccaactggactacgtcgaacccacaaatcccacaaagcgcgtgaaatcaaatcgctcaaaccacaaaaaagaacaacgcgtttgttacacgctcaatcccacgcgagtagagcacagtaaccttcaaataagcgaatggggcataatcagaaatccgaaataaacctaggggcattatcggaaatgaaaagtagctcactcaatataaaaatctaggaaccctagttttcgttatcactctgtgctccctcgctctatttctcagtctctgtgtttgcggctgaggattccgaacgagtgaccttcttcgtttctcgcaaaggtaacagcctctgctcttgtctcttcgattcgatctatgcctgtctcttatttacgatgatgtttcttcggttatgtttttttatttatgctttatgctgttgatgttcggttgtttgtttcgctttgtttttgtggttcagttttttaggattcttttggtttttgaatcgattaatcggaagagattttcgagttatttggtgtgttggaggtgaatcttttttttgaggtcatagatctgttgtatttgtgttataaacatgcgactttgtatgattttttacgaggttatgatgttctggttgttttattatgaatctgttgagacagaaccatgatttttgttgatgttcgtttacactattaaaggtttgttttaacaggattaaaagttttttaagcatgttgaaggagtcttgtagatatgtaaccgtcgatagtttttttgtgggtttgttcacatgttatcaagcttaatcttttactatgtatgcgaccatatctggatccagcaaaggcgattttttaattccttgtgaaacttttgtaatatgaagttgaaattttgttattggtaaactataaatgtgtgaagttggagtatacctttaccttcttatttggctttgtgatagtttaatttatatgtattttgagttctgacttgtatttctttgaattgattctagtttaagtaatccatggccagactcgacaagagcaaggtgatcaacagcgcactggagctgctgaacgaggtcggaatcgaaggcctcacaacccgtaagctcgcccagaagctcggggttgagcagcctacattgtactggcacgtcaagaacaagcgagctctgctagacgctatggccattgagatgctcgataggcacgctacccacgtgtgccctttggaaggggaaagctggcaagacttcttgaggaacaacgctaagatcatgagatgtgctttgctcagtcaccgtgatggagccaaggtctgtctaggtacgggcttcacggagcaacagtatgaaactgctgagaacagccttgccttcctgtgccaacaaggtttctcccttgagcatgccctctacgcaatgcaagctgctgggatcttcactctgggttgcgtcttgctggatcaagagctgcaagtcgctaaggaggagagggaaacacctactactgatagtatgccgccactggttcgacaagctctggaactcaacgatcaccaaggtgcagagccagccttcctgttcggccttgaactgatcatatgcggattggagaagcagctgaagtgtgaaagtgggtcttaatgatagctgcaggcatgccgctgaaatcaccagtctctctctacaaatctatctctctctataataatgtgtgagtagttcccagataagggaattagggttcttatagggtttcgctcatgtgttgagcatataagaaacccttagtatgtatttgtatttgtaaaatacttctatcaataaaatttctaattcctaaaaccaaaatccagtggcgagctcgagcccgggcacccagctttcttgtacaaagtggttcgataaacactagtaacggccgccagtgtgctggaattcgcccttcccaagctttgctctagatcaaactcacatccaaacataacatggatatcttccttaccaatcatactaattattttgggttaaatattaatcattatttttaagatattaattaagaaattaaaagattttttaaaaaaatgtataaaattatattattcatgatttttcatacatttgattttgataataaatatattttttttaatttcttaaaaaatgttgcaagacacttattagacatagtcttgttctgtttacaaaagcattcatcatttaatacattaaaaaatatttaatactaacagtagaatcttcttgtgagtggtgtgggagtaggcaacctggcattgaaacgagagaaagagagtcagaaccagaagacaaataaaaagtatgcaacaaacaaatcaaaatcaaagggcaaaggctggggttggctcaattggttgctacattcaattttcaactcagtcaacggttgagattcactctgacttccccaatctaagccgcggatgcaaacggttgaatctaacccacaatccaatctcgttacttaggggcttttccgtcattaactcacccctgccacccggtttccctataaattggaactcaatgctcccctctaaactcgtatcgcttcagagttgagaccaagacacactcgttcatatatctctctgctcttctcttctcttctacctctcaaggtacttttcttctccctctaccaaatcctagattccgtggttcaatttcggatcttgcacttctggtttgctttgccttgctttttcctcaactgggtccatctaggatccatgtgaaactctactctttctttaatatctgcggaatacgcgtttgactttcagatctagtcgaaatcatttcataattgcctttctttcttttagcttatgagaaataaaatcactttttttttatttcaaaataaaccttgggccttgtgctgactgagatggggtttggtgattacagaattttagcgaattttgtaattgtacttgtttgtctgtagttttgttttgttttcttgtttctcatacattccttaggcttcaattttattcgagtataggtcacaataggaattcaaactttgagcaggggaattaatcccttccttcaaatccagtttgtttgtatatatgtttaaaaaatgaaacttttgctttaaattctattataactttttttatggctgaaatttttgcatgtgtctttgctctctgttgtaaatttactgtttaggtactaactctaggcttgttgtgcagtttttgaagtataacaacagaagttcctattccgaagttcctattctctagaaagtataggaacttccaccacacaacacaatggcggccaccgcttccagaaccacccgattctcttcttcctcttcacaccccaccttccccaaacgcattactagatccaccctccctctctctcatcaaaccctcaccaaacccaaccacgctctcaaaatcaaatgttccatctccaaaccccccacggcggcgcccttcaccaaggaagcgccgaccacggagcccttcgtgtcacggttcgcctccggcgaacctcgcaagggcgcggacatccttgtggaggcgctggagaggcagggcgtgacgacggtgttcgcgtaccccggcggtgcgtcgatggagatccaccaggcgctcacgcgctccgccgccatccgcaacgtgctcccgcgccacgagcagggcggcgtcttcgccgccgaaggctacgcgcgttcctccggcctccccggcgtctgcattgccacctccggccccggcgccaccaacctcgtgagcggcctcgccgacgctttaatggacagcgtcccagtcgtcgccatcaccggccaggtcgcccgccggatgatcggcaccgacgccttccaagaaaccccgatcgtggaggtgagcagatccatcacgaagcacaactacctcatcctcgacgtcgacgacatcccccgcgtcgtcgccgaggctttcttcgtcgccacctccggccgccccggtccggtcctcatcgacattcccaaagacgttcagcagcaactcgccgtgcctaattgggacgagcccgttaacctccccggttacctcgccaggctgcccaggccccccgccgaggcccaattggaacacattgtcagactcatcatggaggcccaaaagcccgttctctacgtcggcggtggcagtttgaattccagtgctgaattgaggcgctttgttgaactcactggtattcccgttgctagcactttaatgggtcttggaacttttcctattggtgatgaatattcccttcagatgctgggtatgcatggtactgtttatgctaactatgctgttgacaatagtgatttgttgcttgcctttggggtaaggtttgatgaccgtgttactgggaagcttgaggcttttgctagtagggctaagattgttcacattgatattgattctgccgagattgggaagaacaagcaggcgcacgtgtcggtttgcgcggatttgaagttggccttgaagggaattaatatgattttggaggagaaaggagtggagggtaagtttgatcttggaggttggagagaagagattaatgtgcagaaacacaagtttccattgggttacaagacattccaggacgcgatttctccgcagcatgctatcgaggttcttgatgagttgactaatggagatgctattgttagtactggggttgggcagcatcaaatgtgggctgcgcagttttacaagtacaagagaccgaggcagtggttgacctcagggggtcttggagccatgggttttggattgcctgcggctattggtgctgctgttgctaaccctggggctgttgtggttgacattgatggggatggtagtttcatcatgaatgttcaggagttggccactataagagtggagaatctcccagttaagatattgttgttgaacaatcagcatttgggtatggtggttcagttggaggataggttctacaagtccaatagagctcacacctatcttggagatccgtctagcgagagcgagatattcccaaacatgctcaagtttgctgatgcttgtgggataccggcagcgcgagtgacgaagaaggaagagcttagagcggcaattcagagaatgttggacacccctggcccctaccttcttgatgtcattgtgccccatcaggagcatgtgttgccgatgattcccagtaatggatccttcaaggatgtgataactgagggtgatggtagaacgaggtactgattgcctagaccaaatgttccttgatgcttgttttgtacaatatatataagataatgctgtcctagttgcaggatttggcctgtggtgagcatcatagtctgtagtagttttggtagcaagacattttattttccttttatttaacttactacatgcagtagcatctatctatctctgtagtctgatatctcctgttgtctgtattgtgccgttggattttttgctgtagtgagactgaaaatgatgtgctagtaataatatttctgttagaaatctaagtagagaatctgttgaagaagtcaaaagctaatggaatcaggttacatattcaatgtttttctttttttagcggttggtagacgtgtagattcaacttctcttggagctcacctaggcaatcagtaaaatgcatattccttttttaacttgccatttatttacttttagtggaaattgtgaccaatttgttcatgtagaacggatttggaccattgcgtccacaaaacgtctcttttgctcgatcttcacaaagcgataccgaaatccagagatagttttcaaaagtcagaaatggcaaagttataaatagtaaaacagaatagatgctgtaatcgacttcaataacaagtggcatcacgtttctagttctagacccatcagctgggccggcccagctgatgatcccggtgaagttcctattccgaagttcctattctccagaaagtataggaacttcactagagcttgcggccgcgcatgctgacttaatcagctaacgccactcgagggggggcccggtaccgg

SEQ ID NO: 842 - DNA, 8131 bp, Artificial Sequence
  PHP37587A
cgcgccggtacccgggtaccgagctcactagacgcggtgaaattacctaattaacaccggtgtttatcaaacaagtttgtacaaaaaagcaggctccggccagaatggcccggaccgggttaccgaattctagaaatccgtcaacatggtggagcacgacactctcgtctactccaagaatatcaaagatacagtctcagaagaccaaagggctattgagacttttcaacaaagggtaatatcgggaaacctcctcggattccattgcccagctatctgtcacttcatcaaaaggacagtagaaaaggaaggtggcacctacaaatgccatcattgcgataaaggaaaggctatcgttcaagatgcctctgccgacagtggtcccaaagatggacccccacccacgaggagcatcgtggaaaaagaagacgttccaaccacgtcttcaaagcaagtggattgatgtgatatctccactgacgtaagggatgacgcacaatcccactagactctatcagtgatagagtgtatataagactctatcagtgatagagtgaactctatcagtgatagagttgtacttatttttacaacaattaccaacaacaacaaacaacaaacaacattacaattactatttacaattacagtcgacccgggatccatggcctcctccgaggacgtcatcaaggagttcatgcgcttcaaggtgcgcatggagggctccgtgaacggccacgagttcgagatcgagggcgagggcgagggccgcccctacgagggcacccagaccgccaagctgaaggtgaccaagggcggccccctgcccttcgcctgggacatcctgtccccccagttccagtacggctccaaggtgtacgtgaagcaccccgccgacatccccgactacaagaagctgtccttccccgagggcttcaagtgggagcgcgtgatgaacttcgaggacggcggcgtggtgaccgtgacccaggactcctccctgcaggacggctccttcatctacaaggtgaagttcatcggcgtgaacttcccctccgacggccccgtaatgcagaagaagactatgggctgggaggcctccaccgagcgcctgtacccccgcgacggcgtgctgaagggcgagatccacaaggccctgaagctgaaggacggcggccactacctggtggagttcaagtccatctacatggccaagaagcccgtgcagctgcccggctactactacgtggactccaagctggacatcacctcccacaacgaggactacaccatcgtggagcagtacgagcgcgccgagggccgccaccacctgttcctgtagcggccccgctgaaatcaccagtctctctctacaaatctatctctctctataataatgtgtgagtagttcccagataagggaattagggttcttatagggtttcgctcatgtgttgagcatataagaaacccttagtatgtatttgtatttgtaaaatacttctatcaataaaatttctaattcctaaaaccaaaatccagtggcgagctcgagggtttacttattttgtgggtatctatacttttattagatttttaatcaggctcctgatttctttttatttcgattgaattcctgaacttgtattattcagtagatcgaataaattataaaaagataaaatcataaaataatattttatcctatcaatcatattaaagcaatgaatatgtaaaattaatcttatctttattttaaaaaatcatataggtttagtatttttttaaaaataaagataggattagttttactattcactgcttattacttttaaaaaaatcataaaggtttagtatttttttaaaataaatataggaatagttttactattcactgctttaatagaaaaatagtttaaaatttaagatagttttaatcccagcatttgccacgtttgaacgtgagccgaaacgatgtcgttacattatcttaacctagctgaaacgatgtcgtcataatatcgccaaatgccaactggactacgtcgaacccacaaatcccacaaagcgcgtgaaatcaaatcgctcaaaccacaaaaaagaacaacgcgtttgttacacgctcaatcccacgcgagtagagcacagtaaccttcaaataagcgaatggggcataatcagaaatccgaaataaacctaggggcattatcggaaatgaaaagtagctcactcaatataaaaatctaggaaccctagttttcgttatcactctgtgctccctcgctctatttctcagtctctgtgtttgcggctgaggattccgaacgagtgaccttcttcgtttctcgcaaaggtaacagcctctgctcttgtctcttcgattcgatctatgcctgtctcttatttacgatgatgtttcttcggttatgtttttttatttatgctttatgctgttgatgttcggttgtttgtttcgctttgtttttgtggttcagttttttaggattcttttggtttttgaatcgattaatcggaagagattttcgagttatttggtgtgttggaggtgaatcttttttttgaggtcatagatctgttgtatttgtgttataaacatgcgactttgtatgattttttacgaggttatgatgttctggttgttttattatgaatctgttgagacagaaccatgatttttgttgatgttcgtttacactattaaaggtttgttttaacaggattaaaagttttttaagcatgttgaaggagtcttgtagatatgtaaccgtcgatagtttttttgtgggtttgttcacatgttatcaagcttaatcttttactatgtatgcgaccatatctggatccagcaaaggcgattttttaattccttgtgaaacttttgtaatatgaagttgaaattttgttattggtaaactataaatgtgtgaagttggagtatacctttaccttcttatttggctttgtgatagtttaatttatatgtattttgagttctgacttgtatttctttgaattgattctagtttaagtaatccatggccagactcgacaagagcaaggtgatcaacagcgcactggagctgctgaacgaggtcggaatcgaaggcctcacaacccgtaagctcgcccagaagctcggggttgagcagcctacattgtactggcacgtcaagaacaagcgagctctgctagacgctatggccattgagatgctcgataggcacgctacccactactgccctttggaaggggaaagctggcaagacttcttgaggaacaacgctaagtccatgagatgtgctttgctcagtcaccgtgatggagccaaggtctgtctaggtacgggcttcacggagcaacagtatgaaactgctgagaacagccttgccttcctgtgccaacaaggtttctcccttgagaacgccctctacgcaatgcaagctgttgggatctacactctgggttgcgtcttgctggatcaagagctgcaagtcgctaaggaggagagggaaacacctactactgatagtatgccgccactggttcgacaagctctggaactcaaggatcaccaaggtgcagagccagccttcctgttcggccttgaactgatcatatgcggattggagaagcagctgaagtgtgaaagtgggtcttaatgatagctgcaggcatgccgctgaaatcaccagtctctctctacaaatctatctctctctataataatgtgtgagtagttcccagataagggaattagggttcttatagggtttcgctcatgtgttgagcatataagaaacccttagtatgtatttgtatttgtaaaatacttctatcaataaaatttctaattcctaaaaccaaaatccagtggcgagctcgagcccgggcacccagctttcttgtacaaagtggttcgataaacactagtaacggccgccagtgtgctggaattcgcccttcccaagctttgctctagatcaaactcacatccaaacataacatggatatcttccttaccaatcatactaattattttgggttaaatattaatcattatttttaagatattaattaagaaattaaaagattttttaaaaaaatgtataaaattatattattcatgatttttcatacatttgattttgataataaatatattttttttaatttcttaaaaaatgttgcaagacacttattagacatagtcttgttctgtttacaaaagcattcatcatttaatacattaaaaaatatttaatactaacagtagaatcttcttgtgagtggtgtgggagtaggcaacctggcattgaaacgagagaaagagagtcagaaccagaagacaaataaaaagtatgcaacaaacaaatcaaaatcaaagggcaaaggctggggttggctcaattggttgctacattcaattttcaactcagtcaacggttgagattcactctgacttccccaatctaagccgcggatgcaaacggttgaatctaacccacaatccaatctcgttacttaggggcttttccgtcattaactcacccctgccacccggtttccctataaattggaactcaatgctcccctctaaactcgtatcgcttcagagttgagaccaagacacactcgttcatatatctctctgctcttctcttctcttctacctctcaaggtacttttcttctccctctaccaaatcctagattccgtggttcaatttcggatcttgcacttctggtttgctttgccttgctttttcctcaactgggtccatctaggatccatgtgaaactctactctttctttaatatctgcggaatacgcgtttgactttcagatctagtcgaaatcatttcataattgcctttctttcttttagcttatgagaaataaaatcactttttttttatttcaaaataaaccttgggccttgtgctgactgagatggggtttggtgattacagaattttagcgaattttgtaattgtacttgtttgtctgtagttttgttttgttttcttgtttctcatacattccttaggcttcaattttattcgagtataggtcacaataggaattcaaactttgagcaggggaattaatcccttccttcaaatccagtttgtttgtatatatgtttaaaaaatgaaacttttgctttaaattctattataactttttttatggctgaaatttttgcatgtgtctttgctctctgttgtaaatttactgtttaggtactaactctaggcttgttgtgcagtttttgaagtataacaacagaagttcctattccgaagttcctattctctagaaagtataggaacttccaccacacaacacaatggcggccaccgcttccagaaccacccgattctcttcttcctcttcacaccccaccttccccaaacgcattactagatccaccctccctctctctcatcaaaccctcaccaaacccaaccacgctctcaaaatcaaatgttccatctccaaaccccccacggcggcgcccttcaccaaggaagcgccgaccacggagcccttcgtgtcacggttcgcctccggcgaacctcgcaagggcgcggacatccttgtggaggcgctggagaggcagggcgtgacgacggtgttcgcgtaccccggcggtgcgtcgatggagatccaccaggcgctcacgcgctccgccgccatccgcaacgtgctcccgcgccacgagcagggcggcgtcttcgccgccgaaggctacgcgcgttcctccggcctccccggcgtctgcattgccacctccggccccggcgccaccaacctcgtgagcggcctcgccgacgctttaatggacagcgtcccagtcgtcgccatcaccggccaggtcgcccgccggatgatcggcaccgacgccttccaagaaaccccgatcgtggaggtgagcagatccatcacgaagcacaactacctcatcctcgacgtcgacgacatcccccgcgtcgtcgccgaggctttcttcgtcgccacctccggccgccccggtccggtcctcatcgacattcccaaagacgttcagcagcaactcgccgtgcctaattgggacgagcccgttaacctccccggttacctcgccaggctgcccaggccccccgccgaggcccaattggaacacattgtcagactcatcatggaggcccaaaagcccgttctctacgtcggcggtggcagtttgaattccagtgctgaattgaggcgctttgttgaactcactggtattcccgttgctagcactttaatgggtcttggaacttttcctattggtgatgaatattcccttcagatgctgggtatgcatggtactgtttatgctaactatgctgttgacaatagtgatttgttgcttgcctttggggtaaggtttgatgaccgtgttactgggaagcttgaggcttttgctagtagggctaagattgttcacattgatattgattctgccgagattgggaagaacaagcaggcgcacgtgtcggtttgcgcggatttgaagttggccttgaagggaattaatatgattttggaggagaaaggagtggagggtaagtttgatcttggaggttggagagaagagattaatgtgcagaaacacaagtttccattgggttacaagacattccaggacgcgatttctccgcagcatgctatcgaggttcttgatgagttgactaatggagatgctattgttagtactggggttgggcagcatcaaatgtgggctgcgcagttttacaagtacaagagaccgaggcagtggttgacctcagggggtcttggagccatgggttttggattgcctgcggctattggtgctgctgttgctaaccctggggctgttgtggttgacattgatggggatggtagtttcatcatgaatgttcaggagttggccactataagagtggagaatctcccagttaagatattgttgttgaacaatcagcatttgggtatggtggttcagttggaggataggttctacaagtccaatagagctcacacctatcttggagatccgtctagcgagagcgagatattcccaaacatgctcaagtttgctgatgcttgtgggataccggcagcgcgagtgacgaagaaggaagagcttagagcggcaattcagagaatgttggacacccctggcccctaccttcttgatgtcattgtgccccatcaggagcatgtgttgccgatgattcccagtaatggatccttcaaggatgtgataactgagggtgatggtagaacgaggtactgattgcctagaccaaatgttccttgatgcttgttttgtacaatatatataagataatgctgtcctagttgcaggatttggcctgtggtgagcatcatagtctgtagtagttttggtagcaagacattttattttccttttatttaacttactacatgcagtagcatctatctatctctgtagtctgatatctcctgttgtctgtattgtgccgttggattttttgctgtagtgagactgaaaatgatgtgctagtaataatatttctgttagaaatctaagtagagaatctgttgaagaagtcaaaagctaatggaatcaggttacatattcaatgtttttctttttttagcggttggtagacgtgtagattcaacttctcttggagctcacctaggcaatcagtaaaatgcatattccttttttaacttgccatttatttacttttagtggaaattgtgaccaatttgttcatgtagaacggatttggaccattgcgtccacaaaacgtctcttttgctcgatcttcacaaagcgataccgaaatccagagatagttttcaaaagtcagaaatggcaaagttataaatagtaaaacagaatagatgctgtaatcgacttcaataacaagtggcatcacgtttctagttctagacccatcagctgggccggcccagctgatgatcccggtgaagttcctattccgaagttcctattctccagaaagtataggaacttcactagagcttgcggccgcgcatgctgacttaatcagctaacgccactcgagggggggcccggtaccgg

SEQ ID NO: 843 - DNA, 8131 bp, Artificial Sequence
  PHP37588A
cgcgccggtacccgggtaccgagctcactagacgcggtgaaattacctaattaacaccggtgtttatcaaacaagtttgtacaaaaaagcaggctccggccagaatggcccggaccgggttaccgaattctagaaatccgtcaacatggtggagcacgacactctcgtctactccaagaatatcaaagatacagtctcagaagaccaaagggctattgagacttttcaacaaagggtaatatcgggaaacctcctcggattccattgcccagctatctgtcacttcatcaaaaggacagtagaaaaggaaggtggcacctacaaatgccatcattgcgataaaggaaaggctatcgttcaagatgcctctgccgacagtggtcccaaagatggacccccacccacgaggagcatcgtggaaaaagaagacgttccaaccacgtcttcaaagcaagtggattgatgtgatatctccactgacgtaagggatgacgcacaatcccactagactctatcagtgatagagtgtatataagactctatcagtgatagagtgaactctatcagtgatagagttgtacttatttttacaacaattaccaacaacaacaaacaacaaacaacattacaattactatttacaattacagtcgacccgggatccatggcctcctccgaggacgtcatcaaggagttcatgcgcttcaaggtgcgcatggagggctccgtgaacggccacgagttcgagatcgagggcgagggcgagggccgcccctacgagggcacccagaccgccaagctgaaggtgaccaagggcggccccctgcccttcgcctgggacatcctgtccccccagttccagtacggctccaaggtgtacgtgaagcaccccgccgacatccccgactacaagaagctgtccttccccgagggcttcaagtgggagcgcgtgatgaacttcgaggacggcggcgtggtgaccgtgacccaggactcctccctgcaggacggctccttcatctacaaggtgaagttcatcggcgtgaacttcccctccgacggccccgtaatgcagaagaagactatgggctgggaggcctccaccgagcgcctgtacccccgcgacggcgtgctgaagggcgagatccacaaggccctgaagctgaaggacggcggccactacctggtggagttcaagtccatctacatggccaagaagcccgtgcagctgcccggctactactacgtggactccaagctggacatcacctcccacaacgaggactacaccatcgtggagcagtacgagcgcgccgagggccgccaccacctgttcctgtagcggccccgctgaaatcaccagtctctctctacaaatctatctctctctataataatgtgtgagtagttcccagataagggaattagggttcttatagggtttcgctcatgtgttgagcatataagaaacccttagtatgtatttgtatttgtaaaatacttctatcaataaaatttctaattcctaaaaccaaaatccagtggcgagctcgagggtttacttattttgtgggtatctatacttttattagatttttaatcaggctcctgatttctttttatttcgattgaattcctgaacttgtattattcagtagatcgaataaattataaaaagataaaatcataaaataatattttatcctatcaatcatattaaagcaatgaatatgtaaaattaatcttatctttattttaaaaaatcatataggtttagtatttttttaaaaataaagataggattagttttactattcactgcttattacttttaaaaaaatcataaaggtttagtatttttttaaaataaatataggaatagttttactattcactgctttaatagaaaaatagtttaaaatttaagatagttttaatcccagcatttgccacgtttgaacgtgagccgaaacgatgtcgttacattatcttaacctagctgaaacgatgtcgtcataatatcgccaaatgccaactggactacgtcgaacccacaaatcccacaaagcgcgtgaaatcaaatcgctcaaaccacaaaaaagaacaacgcgtttgttacacgctcaatcccacgcgagtagagcacagtaaccttcaaataagcgaatggggcataatcagaaatccgaaataaacctaggggcattatcggaaatgaaaagtagctcactcaatataaaaatctaggaaccctagttttcgttatcactctgtgctccctcgctctatttctcagtctctgtgtttgcggctgaggattccgaacgagtgaccttcttcgtttctcgcaaaggtaacagcctctgctcttgtctcttcgattcgatctatgcctgtctcttatttacgatgatgtttcttcggttatgtttttttatttatgctttatgctgttgatgttcggttgtttgtttcgctttgtttttgtggttcagttttttaggattcttttggtttttgaatcgattaatcggaagagattttcgagttatttggtgtgttggaggtgaatcttttttttgaggtcatagatctgttgtatttgtgttataaacatgcgactttgtatgattttttacgaggttatgatgttctggttgttttattatgaatctgttgagacagaaccatgatttttgttgatgttcgtttacactattaaaggtttgttttaacaggattaaaagttttttaagcatgttgaaggagtcttgtagatatgtaaccgtcgatagtttttttgtgggtttgttcacatgttatcaagcttaatcttttactatgtatgcgaccatatctggatccagcaaaggcgattttttaattccttgtgaaacttttgtaatatgaagttgaaattttgttattggtaaactataaatgtgtgaagttggagtatacctttaccttcttatttggctttgtgatagtttaatttatatgtattttgagttctgacttgtatttctttgaattgattctagtttaagtaatccatggccagactcgacaagagcaaggtgatcaacagcgcactggagctgctgaacgaggtcggaatcgaaggcctcacaacccgtaagctcgcccagaagctcggggttgagcagcctacattgtactggcacgtcaagaacaagcgagctctgctagacgctatggccattgagatgctcgataggcacgctacccactactgccctttggaaggggaaagctggcaagacttcttgaggaacaacgctaagtccatgagatgtgctttgctcagtcaccgtgatggagccaaggtctgtctaggtacgggcttcacggagcaacagtatgaaactgctgagaacagcatggccttcctgtgccaacaaggtttctcccttgagaacgccctctacgcaatgcaagctgttgggatctacactctgggttgcgtcttgctggatcaagagctgcaagtcgctaaggaggagagggaaacacctactactgatagtatgccgccactggttcgacaagctctggaactcaaggatcaccaaggtgcagagccagccttcctgttcggccttgaactgatcatatgcggattggagaagcagctgaagtgtgaaagtgggtcttaatgatagctgcaggcatgccgctgaaatcaccagtctctctctacaaatctatctctctctataataatgtgtgagtagttcccagataagggaattagggttcttatagggtttcgctcatgtgttgagcatataagaaacccttagtatgtatttgtatttgtaaaatacttctatcaataaaatttctaattcctaaaaccaaaatccagtggcgagctcgagcccgggcacccagctttcttgtacaaagtggttcgataaacactagtaacggccgccagtgtgctggaattcgcccttcccaagctttgctctagatcaaactcacatccaaacataacatggatatcttccttaccaatcatactaattattttgggttaaatattaatcattatttttaagatattaattaagaaattaaaagattttttaaaaaaatgtataaaattatattattcatgatttttcatacatttgattttgataataaatatattttttttaatttcttaaaaaatgttgcaagacacttattagacatagtcttgttctgtttacaaaagcattcatcatttaatacattaaaaaatatttaatactaacagtagaatcttcttgtgagtggtgtgggagtaggcaacctggcattgaaacgagagaaagagagtcagaaccagaagacaaataaaaagtatgcaacaaacaaatcaaaatcaaagggcaaaggctggggttggctcaattggttgctacattcaattttcaactcagtcaacggttgagattcactctgacttccccaatctaagccgcggatgcaaacggttgaatctaacccacaatccaatctcgttacttaggggcttttccgtcattaactcacccctgccacccggtttccctataaattggaactcaatgctcccctctaaactcgtatcgcttcagagttgagaccaagacacactcgttcatatatctctctgctcttctcttctcttctacctctcaaggtacttttcttctccctctaccaaatcctagattccgtggttcaatttcggatcttgcacttctggtttgctttgccttgctttttcctcaactgggtccatctaggatccatgtgaaactctactctttctttaatatctgcggaatacgcgtttgactttcagatctagtcgaaatcatttcataattgcctttctttcttttagcttatgagaaataaaatcactttttttttatttcaaaataaaccttgggccttgtgctgactgagatggggtttggtgattacagaattttagcgaattttgtaattgtacttgtttgtctgtagttttgttttgttttcttgtttctcatacattccttaggcttcaattttattcgagtataggtcacaataggaattcaaactttgagcaggggaattaatcccttccttcaaatccagtttgtttgtatatatgtttaaaaaatgaaacttttgctttaaattctattataactttttttatggctgaaatttttgcatgtgtctttgctctctgttgtaaatttactgtttaggtactaactctaggcttgttgtgcagtttttgaagtataacaacagaagttcctattccgaagttcctattctctagaaagtataggaacttccaccacacaacacaatggcggccaccgcttccagaaccacccgattctcttcttcctcttcacaccccaccttccccaaacgcattactagatccaccctccctctctctcatcaaaccctcaccaaacccaaccacgctctcaaaatcaaatgttccatctccaaaccccccacggcggcgcccttcaccaaggaagcgccgaccacggagcccttcgtgtcacggttcgcctccggcgaacctcgcaagggcgcggacatccttgtggaggcgctggagaggcagggcgtgacgacggtgttcgcgtaccccggcggtgcgtcgatggagatccaccaggcgctcacgcgctccgccgccatccgcaacgtgctcccgcgccacgagcagggcggcgtcttcgccgccgaaggctacgcgcgttcctccggcctccccggcgtctgcattgccacctccggccccggcgccaccaacctcgtgagcggcctcgccgacgctttaatggacagcgtcccagtcgtcgccatcaccggccaggtcgcccgccggatgatcggcaccgacgccttccaagaaaccccgatcgtggaggtgagcagatccatcacgaagcacaactacctcatcctcgacgtcgacgacatcccccgcgtcgtcgccgaggctttcttcgtcgccacctccggccgccccggtccggtcctcatcgacattcccaaagacgttcagcagcaactcgccgtgcctaattgggacgagcccgttaacctccccggttacctcgccaggctgcccaggccccccgccgaggcccaattggaacacattgtcagactcatcatggaggcccaaaagcccgttctctacgtcggcggtggcagtttgaattccagtgctgaattgaggcgctttgttgaactcactggtattcccgttgctagcactttaatgggtcttggaacttttcctattggtgatgaatattcccttcagatgctgggtatgcatggtactgtttatgctaactatgctgttgacaatagtgatttgttgcttgcctttggggtaaggtttgatgaccgtgttactgggaagcttgaggcttttgctagtagggctaagattgttcacattgatattgattctgccgagattgggaagaacaagcaggcgcacgtgtcggtttgcgcggatttgaagttggccttgaagggaattaatatgattttggaggagaaaggagtggagggtaagtttgatcttggaggttggagagaagagattaatgtgcagaaacacaagtttccattgggttacaagacattccaggacgcgatttctccgcagcatgctatcgaggttcttgatgagttgactaatggagatgctattgttagtactggggttgggcagcatcaaatgtgggctgcgcagttttacaagtacaagagaccgaggcagtggttgacctcagggggtcttggagccatgggttttggattgcctgcggctattggtgctgctgttgctaaccctggggctgttgtggttgacattgatggggatggtagtttcatcatgaatgttcaggagttggccactataagagtggagaatctcccagttaagatattgttgttgaacaatcagcatttgggtatggtggttcagttggaggataggttctacaagtccaatagagctcacacctatcttggagatccgtctagcgagagcgagatattcccaaacatgctcaagtttgctgatgcttgtgggataccggcagcgcgagtgacgaagaaggaagagcttagagcggcaattcagagaatgttggacacccctggcccctaccttcttgatgtcattgtgccccatcaggagcatgtgttgccgatgattcccagtaatggatccttcaaggatgtgataactgagggtgatggtagaacgaggtactgattgcctagaccaaatgttccttgatgcttgttttgtacaatatatataagataatgctgtcctagttgcaggatttggcctgtggtgagcatcatagtctgtagtagttttggtagcaagacattttattttccttttatttaacttactacatgcagtagcatctatctatctctgtagtctgatatctcctgttgtctgtattgtgccgttggattttttgctgtagtgagactgaaaatgatgtgctagtaataatatttctgttagaaatctaagtagagaatctgttgaagaagtcaaaagctaatggaatcaggttacatattcaatgtttttctttttttagcggttggtagacgtgtagattcaacttctcttggagctcacctaggcaatcagtaaaatgcatattccttttttaacttgccatttatttacttttagtggaaattgtgaccaatttgttcatgtagaacggatttggaccattgcgtccacaaaacgtctcttttgctcgatcttcacaaagcgataccgaaatccagagatagttttcaaaagtcagaaatggcaaagttataaatagtaaaacagaatagatgctgtaatcgacttcaataacaagtggcatcacgtttctagttctagacccatcagctgggccggcccagctgatgatcccggtgaagttcctattccgaagttcctattctccagaaagtataggaacttcactagagcttgcggccgcgcatgctgacttaatcagctaacgccactcgagggggggcccggtaccgg

SEQ ID NO: 844 - DNA, 8131 bp, Artificial Sequence
  PHP37589A
cgcgccggtacccgggtaccgagctcactagacgcggtgaaattacctaattaacaccggtgtttatcaaacaagtttgtacaaaaaagcaggctccggccagaatggcccggaccgggttaccgaattctagaaatccgtcaacatggtggagcacgacactctcgtctactccaagaatatcaaagatacagtctcagaagaccaaagggctattgagacttttcaacaaagggtaatatcgggaaacctcctcggattccattgcccagctatctgtcacttcatcaaaaggacagtagaaaaggaaggtggcacctacaaatgccatcattgcgataaaggaaaggctatcgttcaagatgcctctgccgacagtggtcccaaagatggacccccacccacgaggagcatcgtggaaaaagaagacgttccaaccacgtcttcaaagcaagtggattgatgtgatatctccactgacgtaagggatgacgcacaatcccactagactctatcagtgatagagtgtatataagactctatcagtgatagagtgaactctatcagtgatagagttgtacttatttttacaacaattaccaacaacaacaaacaacaaacaacattacaattactatttacaattacagtcgacccgggatccatggcctcctccgaggacgtcatcaaggagttcatgcgcttcaaggtgcgcatggagggctccgtgaacggccacgagttcgagatcgagggcgagggcgagggccgcccctacgagggcacccagaccgccaagctgaaggtgaccaagggcggccccctgcccttcgcctgggacatcctgtccccccagttccagtacggctccaaggtgtacgtgaagcaccccgccgacatccccgactacaagaagctgtccttccccgagggcttcaagtgggagcgcgtgatgaacttcgaggacggcggcgtggtgaccgtgacccaggactcctccctgcaggacggctccttcatctacaaggtgaagttcatcggcgtgaacttcccctccgacggccccgtaatgcagaagaagactatgggctgggaggcctccaccgagcgcctgtacccccgcgacggcgtgctgaagggcgagatccacaaggccctgaagctgaaggacggcggccactacctggtggagttcaagtccatctacatggccaagaagcccgtgcagctgcccggctactactacgtggactccaagctggacatcacctcccacaacgaggactacaccatcgtggagcagtacgagcgcgccgagggccgccaccacctgttcctgtagcggccccgctgaaatcaccagtctctctctacaaatctatctctctctataataatgtgtgagtagttcccagataagggaattagggttcttatagggtttcgctcatgtgttgagcatataagaaacccttagtatgtatttgtatttgtaaaatacttctatcaataaaatttctaattcctaaaaccaaaatccagtggcgagctcgagggtttacttattttgtgggtatctatacttttattagatttttaatcaggctcctgatttctttttatttcgattgaattcctgaacttgtattattcagtagatcgaataaattataaaaagataaaatcataaaataatattttatcctatcaatcatattaaagcaatgaatatgtaaaattaatcttatctttattttaaaaaatcatataggtttagtatttttttaaaaataaagataggattagttttactattcactgcttattacttttaaaaaaatcataaaggtttagtatttttttaaaataaatataggaatagttttactattcactgctttaatagaaaaatagtttaaaatttaagatagttttaatcccagcatttgccacgtttgaacgtgagccgaaacgatgtcgttacattatcttaacctagctgaaacgatgtcgtcataatatcgccaaatgccaactggactacgtcgaacccacaaatcccacaaagcgcgtgaaatcaaatcgctcaaaccacaaaaaagaacaacgcgtttgttacacgctcaatcccacgcgagtagagcacagtaaccttcaaataagcgaatggggcataatcagaaatccgaaataaacctaggggcattatcggaaatgaaaagtagctcactcaatataaaaatctaggaaccctagttttcgttatcactctgtgctccctcgctctatttctcagtctctgtgtttgcggctgaggattccgaacgagtgaccttcttcgtttctcgcaaaggtaacagcctctgctcttgtctcttcgattcgatctatgcctgtctcttatttacgatgatgtttcttcggttatgtttttttatttatgctttatgctgttgatgttcggttgtttgtttcgctttgtttttgtggttcagttttttaggattcttttggtttttgaatcgattaatcggaagagattttcgagttatttggtgtgttggaggtgaatcttttttttgaggtcatagatctgttgtatttgtgttataaacatgcgactttgtatgattttttacgaggttatgatgttctggttgttttattatgaatctgttgagacagaaccatgatttttgttgatgttcgtttacactattaaaggtttgttttaacaggattaaaagttttttaagcatgttgaaggagtcttgtagatatgtaaccgtcgatagtttttttgtgggtttgttcacatgttatcaagcttaatcttttactatgtatgcgaccatatctggatccagcaaaggcgattttttaattccttgtgaaacttttgtaatatgaagttgaaattttgttattggtaaactataaatgtgtgaagttggagtatacctttaccttcttatttggctttgtgatagtttaatttatatgtattttgagttctgacttgtatttctttgaattgattctagtttaagtaatccatggccagactcgacaagagcaaggtgatcaacagcgcactggagctgctgaacgaggtcggaatcgaaggcctcacaacccgtaagctcgcccagaagctcggggttgagcagcctacattgtactggcacgtcaagaacaagcgagctctgctagacgctatggccattgagatgctcgataggcacgctacccactactgccctttggaaggggaaagctggcaagacttcttgaggaacaacgctaagtccatgagatgtgctttgctcagtcaccgtgatggagccaaggtctgtctaggtacgggcttcacggagcaacagtatgaaactgctgagaacagccttgccttcctgtgccaacaaggtttctcccttgagcatgccatgtacgcaatgcaagctgctgggatctacactctgggttgcgtcttgctggatcaagagctgcaagtcgctaaggaggagagggaaacacctactactgatagtatgccgccactggttcgacaagctctggaactcaaggatcaccaaggtgcagagccagccttcctgttcggccttgaactgatcatatgcggattggagaagcagctgaagtgtgaaagtgggtcttaatgatagctgcaggcatgccgctgaaatcaccagtctctctctacaaatctatctctctctataataatgtgtgagtagttcccagataagggaattagggttcttatagggtttcgctcatgtgttgagcatataagaaacccttagtatgtatttgtatttgtaaaatacttctatcaataaaatttctaattcctaaaaccaaaatccagtggcgagctcgagcccgggcacccagctttcttgtacaaagtggttcgataaacactagtaacggccgccagtgtgctggaattcgcccttcccaagctttgctctagatcaaactcacatccaaacataacatggatatcttccttaccaatcatactaattattttgggttaaatattaatcattatttttaagatattaattaagaaattaaaagattttttaaaaaaatgtataaaattatattattcatgatttttcatacatttgattttgataataaatatattttttttaatttcttaaaaaatgttgcaagacacttattagacatagtcttgttctgtttacaaaagcattcatcatttaatacattaaaaaatatttaatactaacagtagaatcttcttgtgagtggtgtgggagtaggcaacctggcattgaaacgagagaaagagagtcagaaccagaagacaaataaaaagtatgcaacaaacaaatcaaaatcaaagggcaaaggctggggttggctcaattggttgctacattcaattttcaactcagtcaacggttgagattcactctgacttccccaatctaagccgcggatgcaaacggttgaatctaacccacaatccaatctcgttacttaggggcttttccgtcattaactcacccctgccacccggtttccctataaattggaactcaatgctcccctctaaactcgtatcgcttcagagttgagaccaagacacactcgttcatatatctctctgctcttctcttctcttctacctctcaaggtacttttcttctccctctaccaaatcctagattccgtggttcaatttcggatcttgcacttctggtttgctttgccttgctttttcctcaactgggtccatctaggatccatgtgaaactctactctttctttaatatctgcggaatacgcgtttgactttcagatctagtcgaaatcatttcataattgcctttctttcttttagcttatgagaaataaaatcactttttttttatttcaaaataaaccttgggccttgtgctgactgagatggggtttggtgattacagaattttagcgaattttgtaattgtacttgtttgtctgtagttttgttttgttttcttgtttctcatacattccttaggcttcaattttattcgagtataggtcacaataggaattcaaactttgagcaggggaattaatcccttccttcaaatccagtttgtttgtatatatgtttaaaaaatgaaacttttgctttaaattctattataactttttttatggctgaaatttttgcatgtgtctttgctctctgttgtaaatttactgtttaggtactaactctaggcttgttgtgcagtttttgaagtataacaacagaagttcctattccgaagttcctattctctagaaagtataggaacttccaccacacaacacaatggcggccaccgcttccagaaccacccgattctcttcttcctcttcacaccccaccttccccaaacgcattactagatccaccctccctctctctcatcaaaccctcaccaaacccaaccacgctctcaaaatcaaatgttccatctccaaaccccccacggcggcgcccttcaccaaggaagcgccgaccacggagcccttcgtgtcacggttcgcctccggcgaacctcgcaagggcgcggacatccttgtggaggcgctggagaggcagggcgtgacgacggtgttcgcgtaccccggcggtgcgtcgatggagatccaccaggcgctcacgcgctccgccgccatccgcaacgtgctcccgcgccacgagcagggcggcgtcttcgccgccgaaggctacgcgcgttcctccggcctccccggcgtctgcattgccacctccggccccggcgccaccaacctcgtgagcggcctcgccgacgctttaatggacagcgtcccagtcgtcgccatcaccggccaggtcgcccgccggatgatcggcaccgacgccttccaagaaaccccgatcgtggaggtgagcagatccatcacgaagcacaactacctcatcctcgacgtcgacgacatcccccgcgtcgtcgccgaggctttcttcgtcgccacctccggccgccccggtccggtcctcatcgacattcccaaagacgttcagcagcaactcgccgtgcctaattgggacgagcccgttaacctccccggttacctcgccaggctgcccaggccccccgccgaggcccaattggaacacattgtcagactcatcatggaggcccaaaagcccgttctctacgtcggcggtggcagtttgaattccagtgctgaattgaggcgctttgttgaactcactggtattcccgttgctagcactttaatgggtcttggaacttttcctattggtgatgaatattcccttcagatgctgggtatgcatggtactgtttatgctaactatgctgttgacaatagtgatttgttgcttgcctttggggtaaggtttgatgaccgtgttactgggaagcttgaggcttttgctagtagggctaagattgttcacattgatattgattctgccgagattgggaagaacaagcaggcgcacgtgtcggtttgcgcggatttgaagttggccttgaagggaattaatatgattttggaggagaaaggagtggagggtaagtttgatcttggaggttggagagaagagattaatgtgcagaaacacaagtttccattgggttacaagacattccaggacgcgatttctccgcagcatgctatcgaggttcttgatgagttgactaatggagatgctattgttagtactggggttgggcagcatcaaatgtgggctgcgcagttttacaagtacaagagaccgaggcagtggttgacctcagggggtcttggagccatgggttttggattgcctgcggctattggtgctgctgttgctaaccctggggctgttgtggttgacattgatggggatggtagtttcatcatgaatgttcaggagttggccactataagagtggagaatctcccagttaagatattgttgttgaacaatcagcatttgggtatggtggttcagttggaggataggttctacaagtccaatagagctcacacctatcttggagatccgtctagcgagagcgagatattcccaaacatgctcaagtttgctgatgcttgtgggataccggcagcgcgagtgacgaagaaggaagagcttagagcggcaattcagagaatgttggacacccctggcccctaccttcttgatgtcattgtgccccatcaggagcatgtgttgccgatgattcccagtaatggatccttcaaggatgtgataactgagggtgatggtagaacgaggtactgattgcctagaccaaatgttccttgatgcttgttttgtacaatatatataagataatgctgtcctagttgcaggatttggcctgtggtgagcatcatagtctgtagtagttttggtagcaagacattttattttccttttatttaacttactacatgcagtagcatctatctatctctgtagtctgatatctcctgttgtctgtattgtgccgttggattttttgctgtagtgagactgaaaatgatgtgctagtaataatatttctgttagaaatctaagtagagaatctgttgaagaagtcaaaagctaatggaatcaggttacatattcaatgtttttctttttttagcggttggtagacgtgtagattcaacttctcttggagctcacctaggcaatcagtaaaatgcatattccttttttaacttgccatttatttacttttagtggaaattgtgaccaatttgttcatgtagaacggatttggaccattgcgtccacaaaacgtctcttttgctcgatcttcacaaagcgataccgaaatccagagatagttttcaaaagtcagaaatggcaaagttataaatagtaaaacagaatagatgctgtaatcgacttcaataacaagtggcatcacgtttctagttctagacccatcagctgggccggcccagctgatgatcccggtgaagttcctattccgaagttcctattctccagaaagtataggaacttcactagagcttgcggccgcgcatgctgacttaatcagctaacgccactcgagggggggcccggtaccgg

SEQ ID NO: 845 - DNA, 8201 bp, Artificial Sequence
  PHP39389A
cgcgccggtacccgggtaccgagctcactagacgcggtgaaattacctaattaacaccggtgtttatcaaacaagtttgtacaaaaaagcaggctccggccagaatggcccggaccgggttaccgaattctagaaatccgtcaacatggtggagcacgacactctcgtctactccaagaatatcaaagatacagtctcagaagaccaaagggctattgagacttttcaacaaagggtaatatcgggaaacctcctcggattccattgcccagctatctgtcacttcatcaaaaggacagtagaaaaggaaggtggcacctacaaatgccatcattgcgataaaggaaaggctatcgttcaagatgcctctgccgacagtggtcccaaagatggacccccacccacgaggagcatcgtggaaaaagaagacgttccaaccacgtcttcaaagcaagtggattgatgtgatatctccactgacgtaagggatgacgcacaatcccactagactctatcagtgatagagtgtatataagactctatcagtgatagagtgaactctatcagtgatagagttgtacttatttttacaacaattaccaacaacaacaaacaacaaacaacattacaattactatttacaattacagtcgacatggcctcctccgaggacgtcatcaaggagttcatgcgcttcaaggtgcgcatggagggctccgtgaacggccacgagttcgagatcgagggcgagggcgagggccgcccctacgagggcacccagaccgccaagctgaaggtgaccaagggcggccccctgcccttcgcctgggacatcctgtccccccagttccagtacggctccaaggtgtacgtgaagcaccccgccgacatccccgactacaagaagctgtccttccccgagggcttcaagtgggagcgcgtgatgaacttcgaggacggcggcgtggtgaccgtgacccaggactcctccctgcaggacggctccttcatctacaaggtgaagttcatcggcgtgaacttcccctccgacggccccgtaatgcagaagaagactatgggctgggaggcctccaccgagcgcctgtacccccgcgacggcgtgctgaagggcgagatccacaaggccctgaagctgaaggacggcggccactacctggtggagttcaagtccatctacatggccaagaagcccgtgcagctgcccggctactactacgtggactccaagctggacatcacctcccacaacgaggactacaccatcgtggagcagtacgagcgcgccgagggccgccaccacctgttcctgtagcggccccgctgaaatcaccagtctctctctacaaatctatctctctctataataatgtgtgagtagttcccagataagggaattagggttcttatagggtttcgctcatgtgttgagcatataagaaacccttagtatgtatttgtatttgtaaaatacttctatcaataaaatttctaattcctaaaaccaaaatccagtggcgagctcgagtctagacccgggtttacttattttgtgggtatctatacttttattagatttttaatcaggctcctgatttctttttatttcgattgaattcctgaacttgtattattcagtagatcgaataaattataaaaagataaaatcataaaataatattttatcctatcaatcatattaaagcaatgaatatgtaaaattaatcttatctttattttaaaaaatcatataggtttagtatttttttaaaaataaagataggattagttttactattcactgcttattacttttaaaaaaatcataaaggtttagtatttttttaaaataaatataggaatagttttactattcactgctttaatagaaaaatagtttaaaatttaagatagttttaatcccagcatttgccacgtttgaacgtgagccgaaacgatgtcgttacattatcttaacctagctgaaacgatgtcgtcataatatcgccaaatgccaactggactacgtcgaacccacaaatcccacaaagcgcgtgaaatcaaatcgctcaaaccacaaaaaagaacaacgcgtttgttacacgctcaatcccacgcgagtagagcacagtaaccttcaaataagcgaatggggcataatcagaaatccgaaataaacctaggggcattatcggaaatgaaaagtagctcactcaatataaaaatctaggaaccctagttttcgttatcactctgtgctccctcgctctatttctcagtctctgtgtttgcggctgaggattccgaacgagtgaccttcttcgtttctcgcaaaggtaacagcctctgctcttgtctcttcgattcgatctatgcctgtctcttatttacgatgatgtttcttcggttatgtttttttatttatgctttatgctgttgatgttcggttgtttgtttcgctttgtttttgtggttcagttttttaggattcttttggtttttgaatcgattaatcggaagagattttcgagttatttggtgtgttggaggtgaatcttttttttgaggtcatagatctgttgtatttgtgttataaacatgcgactttgtatgattttttacgaggttatgatgttctggttgttttattatgaatctgttgagacagaaccatgatttttgttgatgttcgtttacactattaaaggtttgttttaacaggattaaaagttttttaagcatgttgaaggagtcttgtagatatgtaaccgtcgatagtttttttgtgggtttgttcacatgttatcaagcttaatcttttactatgtatgcgaccatatctggatccagcaaaggcgattttttaattccttgtgaaacttttgtaatatgaagttgaaattttgttattggtaaactataaatgtgtgaagttggagtatacctttaccttcttatttggctttgtgatagtttaatttatatgtattttgagttctgacttgtatttctttgaattgattctagtttaagtaatccatggccagactcgacaagagcaaggtgatcaacagcgcactggagctgctgaacgaggtcggaatcgaaggcctcacaacccgtaagctcgcccagaagctcggggttgagcagcctacattgtactggcacgtcaagaacaagcgagctctgctagacgctatggccatcgagatgctcgatccccacgctccccacttgttacccttggaaggggcaagctggcaagacttcttgaggaacaacgctaagtccatgagatgcgctttgctcagtcaccgtgatggagccaaggtctgtctaggtacgggcttcacggagcaacagtatgaaactgctgagaacagccttgccttcctgacacaacaaggtttctcccttgagaacgccctctacgcaatgcaagctgttgggatctacactctgggttgcgcgttgctggatcaagagctgcaagtcgctaaggaggagagggaaacacctactactgatagtatgccgccactggttcgacaagctctggaactcaaggatcaccaaggtgcagagccagccttcctgttcggccttgaactgatcataagcggattggagaagcagctgaagcgtgaaagtgggtcttaatgataggcggccgctaaagaaggagtgcgtcgaagcagatcgttcaaacatttggcaataaagtttcttaagattgaatcctgttgccggtcttgcgatgattatcatataatttctgttgaattacgttaagcatgtaataattaacatgtaatgcatgacgttatttatgagatgggtttttatgattagagtcccgcaattatacatttaatacgcgatagaaaacaaaatatagcgcgcaaactaggataaattatcgcgcgcggtgtcatctatgttactagatcgatggatgggcacccagctttcttgtacaaagtggttcgataaacactagtaacggccgccagtgtgctggaattcgcccttcccaagctttgctctagatcaaactcacatccaaacataacatggatatcttccttaccaatcatactaattattttgggttaaatattaatcattatttttaagatattaattaagaaattaaaagattttttaaaaaaatgtataaaattatattattcatgatttttcatacatttgattttgataataaatatattttttttaatttcttaaaaaatgttgcaagacacttattagacatagtcttgttctgtttacaaaagcattcatcatttaatacattaaaaaatatttaatactaacagtagaatcttcttgtgagtggtgtgggagtaggcaacctggcattgaaacgagagaaagagagtcagaaccagaagacaaataaaaagtatgcaacaaacaaatcaaaatcaaagggcaaaggctggggttggctcaattggttgctacattcaattttcaactcagtcaacggttgagattcactctgacttccccaatctaagccgcggatgcaaacggttgaatctaacccacaatccaatctcgttacttaggggcttttccgtcattaactcacccctgccacccggtttccctataaattggaactcaatgctcccctctaaactcgtatcgcttcagagttgagaccaagacacactcgttcatatatctctctgctcttctcttctcttctacctctcaaggtacttttcttctccctctaccaaatcctagattccgtggttcaatttcggatcttgcacttctggtttgctttgccttgctttttcctcaactgggtccatctaggatccatgtgaaactctactctttctttaatatctgcggaatacgcgtttgactttcagatctagtcgaaatcatttcataattgcctttctttcttttagcttatgagaaataaaatcactttttttttatttcaaaataaaccttgggccttgtgctgactgagatggggtttggtgattacagaattttagcgaattttgtaattgtacttgtttgtctgtagttttgttttgttttcttgtttctcatacattccttaggcttcaattttattcgagtataggtcacaataggaattcaaactttgagcaggggaattaatcccttccttcaaatccagtttgtttgtatatatgtttaaaaaatgaaacttttgctttaaattctattataactttttttatggctgaaatttttgcatgtgtctttgctctctgttgtaaatttactgtttaggtactaactctaggcttgttgtgcagtttttgaagtataacaacagaagttcctattccgaagttcctattctctagaaagtataggaacttccaccacacaacacaatggcggccaccgcttccagaaccacccgattctcttcttcctcttcacaccccaccttccccaaacgcattactagatccaccctccctctctctcatcaaaccctcaccaaacccaaccacgctctcaaaatcaaatgttccatctccaaaccccccacggcggcgcccttcaccaaggaagcgccgaccacggagcccttcgtgtcacggttcgcctccggcgaacctcgcaagggcgcggacatccttgtggaggcgctggagaggcagggcgtgacgacggtgttcgcgtaccccggcggtgcgtcgatggagatccaccaggcgctcacgcgctccgccgccatccgcaacgtgctcccgcgccacgagcagggcggcgtcttcgccgccgaaggctacgcgcgttcctccggcctccccggcgtctgcattgccacctccggccccggcgccaccaacctcgtgagcggcctcgccgacgctttaatggacagcgtcccagtcgtcgccatcaccggccaggtcgcccgccggatgatcggcaccgacgccttccaagaaaccccgatcgtggaggtgagcagatccatcacgaagcacaactacctcatcctcgacgtcgacgacatcccccgcgtcgtcgccgaggctttcttcgtcgccacctccggccgccccggtccggtcctcatcgacattcccaaagacgttcagcagcaactcgccgtgcctaattgggacgagcccgttaacctccccggttacctcgccaggctgcccaggccccccgccgaggcccaattggaacacattgtcagactcatcatggaggcccaaaagcccgttctctacgtcggcggtggcagtttgaattccagtgctgaattgaggcgctttgttgaactcactggtattcccgttgctagcactttaatgggtcttggaacttttcctattggtgatgaatattcccttcagatgctgggtatgcatggtactgtttatgctaactatgctgttgacaatagtgatttgttgcttgcctttggggtaaggtttgatgaccgtgttactgggaagcttgaggcttttgctagtagggctaagattgttcacattgatattgattctgccgagattgggaagaacaagcaggcgcacgtgtcggtttgcgcggatttgaagttggccttgaagggaattaatatgattttggaggagaaaggagtggagggtaagtttgatcttggaggttggagagaagagattaatgtgcagaaacacaagtttccattgggttacaagacattccaggacgcgatttctccgcagcatgctatcgaggttcttgatgagttgactaatggagatgctattgttagtactggggttgggcagcatcaaatgtgggctgcgcagttttacaagtacaagagaccgaggcagtggttgacctcagggggtcttggagccatgggttttggattgcctgcggctattggtgctgctgttgctaaccctggggctgttgtggttgacattgatggggatggtagtttcatcatgaatgttcaggagttggccactataagagtggagaatctcccagttaagatattgttgttgaacaatcagcatttgggtatggtggttcagttggaggataggttctacaagtccaatagagctcacacctatcttggagatccgtctagcgagagcgagatattcccaaacatgctcaagtttgctgatgcttgtgggataccggcagcgcgagtgacgaagaaggaagagcttagagcggcaattcagagaatgttggacacccctggcccctaccttcttgatgtcattgtgccccatcaggagcatgtgttgccgatgattcccagtaatggatccttcaaggatgtgataactgagggtgatggtagaacgaggtactgattgcctagaccaaatgttccttgatgcttgttttgtacaatatatataagataatgctgtcctagttgcaggatttggcctgtggtgagcatcatagtctgtagtagttttggtagcaagacattttattttccttttatttaacttactacatgcagtagcatctatctatctctgtagtctgatatctcctgttgtctgtattgtgccgttggattttttgctgtagtgagactgaaaatgatgtgctagtaataatatttctgttagaaatctaagtagagaatctgttgaagaagtcaaaagctaatggaatcaggttacatattcaatgtttttctttttttagcggttggtagacgtgtagattcaacttctcttggagctcacctaggcaatcagtaaaatgcatattccttttttaacttgccatttatttacttttagtggaaattgtgaccaatttgttcatgtagaacggatttggaccattgcgtccacaaaacgtctcttttgctcgatcttcacaaagcgataccgaaatccagagatagttttcaaaagtcagaaatggcaaagttataaatagtaaaacagaatagatgctgtaatcgacttcaataacaagtggcatcacgtttctagttctagacccatcagctgggccggcccagctgatgatcccggtgaagttcctattccgaagttcctattctccagaaagtataggaacttcactagagcttgcggccgcgcatgctgacttaatcagctaacgccactcgagggggggcccggtaccgg

SEQ ID NO: 846 - DNA, 8201 bp, Artificial Sequence
  PHP39390A
cgcgccggtacccgggtaccgagctcactagacgcggtgaaattacctaattaacaccggtgtttatcaaacaagtttgtacaaaaaagcaggctccggccagaatggcccggaccgggttaccgaattctagaaatccgtcaacatggtggagcacgacactctcgtctactccaagaatatcaaagatacagtctcagaagaccaaagggctattgagacttttcaacaaagggtaatatcgggaaacctcctcggattccattgcccagctatctgtcacttcatcaaaaggacagtagaaaaggaaggtggcacctacaaatgccatcattgcgataaaggaaaggctatcgttcaagatgcctctgccgacagtggtcccaaagatggacccccacccacgaggagcatcgtggaaaaagaagacgttccaaccacgtcttcaaagcaagtggattgatgtgatatctccactgacgtaagggatgacgcacaatcccactagactctatcagtgatagagtgtatataagactctatcagtgatagagtgaactctatcagtgatagagttgtacttatttttacaacaattaccaacaacaacaaacaacaaacaacattacaattactatttacaattacagtcgacatggcctcctccgaggacgtcatcaaggagttcatgcgcttcaaggtgcgcatggagggctccgtgaacggccacgagttcgagatcgagggcgagggcgagggccgcccctacgagggcacccagaccgccaagctgaaggtgaccaagggcggccccctgcccttcgcctgggacatcctgtccccccagttccagtacggctccaaggtgtacgtgaagcaccccgccgacatccccgactacaagaagctgtccttccccgagggcttcaagtgggagcgcgtgatgaacttcgaggacggcggcgtggtgaccgtgacccaggactcctccctgcaggacggctccttcatctacaaggtgaagttcatcggcgtgaacttcccctccgacggccccgtaatgcagaagaagactatgggctgggaggcctccaccgagcgcctgtacccccgcgacggcgtgctgaagggcgagatccacaaggccctgaagctgaaggacggcggccactacctggtggagttcaagtccatctacatggccaagaagcccgtgcagctgcccggctactactacgtggactccaagctggacatcacctcccacaacgaggactacaccatcgtggagcagtacgagcgcgccgagggccgccaccacctgttcctgtagcggccccgctgaaatcaccagtctctctctacaaatctatctctctctataataatgtgtgagtagttcccagataagggaattagggttcttatagggtttcgctcatgtgttgagcatataagaaacccttagtatgtatttgtatttgtaaaatacttctatcaataaaatttctaattcctaaaaccaaaatccagtggcgagctcgagtctagacccgggtttacttattttgtgggtatctatacttttattagatttttaatcaggctcctgatttctttttatttcgattgaattcctgaacttgtattattcagtagatcgaataaattataaaaagataaaatcataaaataatattttatcctatcaatcatattaaagcaatgaatatgtaaaattaatcttatctttattttaaaaaatcatataggtttagtatttttttaaaaataaagataggattagttttactattcactgcttattacttttaaaaaaatcataaaggtttagtatttttttaaaataaatataggaatagttttactattcactgctttaatagaaaaatagtttaaaatttaagatagttttaatcccagcatttgccacgtttgaacgtgagccgaaacgatgtcgttacattatcttaacctagctgaaacgatgtcgtcataatatcgccaaatgccaactggactacgtcgaacccacaaatcccacaaagcgcgtgaaatcaaatcgctcaaaccacaaaaaagaacaacgcgtttgttacacgctcaatcccacgcgagtagagcacagtaaccttcaaataagcgaatggggcataatcagaaatccgaaataaacctaggggcattatcggaaatgaaaagtagctcactcaatataaaaatctaggaaccctagttttcgttatcactctgtgctccctcgctctatttctcagtctctgtgtttgcggctgaggattccgaacgagtgaccttcttcgtttctcgcaaaggtaacagcctctgctcttgtctcttcgattcgatctatgcctgtctcttatttacgatgatgtttcttcggttatgtttttttatttatgctttatgctgttgatgttcggttgtttgtttcgctttgtttttgtggttcagttttttaggattcttttggtttttgaatcgattaatcggaagagattttcgagttatttggtgtgttggaggtgaatcttttttttgaggtcatagatctgttgtatttgtgttataaacatgcgactttgtatgattttttacgaggttatgatgttctggttgttttattatgaatctgttgagacagaaccatgatttttgttgatgttcgtttacactattaaaggtttgttttaacaggattaaaagttttttaagcatgttgaaggagtcttgtagatatgtaaccgtcgatagtttttttgtgggtttgttcacatgttatcaagcttaatcttttactatgtatgcgaccatatctggatccagcaaaggcgattttttaattccttgtgaaacttttgtaatatgaagttgaaattttgttattggtaaactataaatgtgtgaagttggagtatacctttaccttcttatttggctttgtgatagtttaatttatatgtattttgagttctgacttgtatttctttgaattgattctagtttaagtaatccatggccagactcgacaagagcaaggtgatcaacagcgcactggagctgctgaacgaggtcggaatcgaaggcctcacaacccgtaagctcgcccagaagctcggggttgagcagcctacattgtactggcacgtcaagaacaagcgagctctgctagacgctatggccattgagatgctcgatcgccacgctatacacttgttacccttggaaggggaaagctggcaagacttcttgaggaacaacgctaagtccatgagatgcgctttgctcagtcaccgtgatggagccaaggtctgtctaggtacgggcttcacggagcaacaatatgaaactgcggagaaccgccttgccttcctgacacaacaaggtttctcccttgagaacgccctctacgcatggcaagcagtggggatctacactctgggttgtgtcttgctggatcaagagctgcaagtcgctaaggaggagagggaaacacctactactgatagtatgccgccactggttcgacaagctctggaactcaaggatcaccaaggtgcagagccagccttcctgttcggccttgaactgatcataggcggattggagaagcagctgaagagtgaaagtgggtcttaatgataggcggccgctaaagaaggagtgcgtcgaagcagatcgttcaaacatttggcaataaagtttcttaagattgaatcctgttgccggtcttgcgatgattatcatataatttctgttgaattacgttaagcatgtaataattaacatgtaatgcatgacgttatttatgagatgggtttttatgattagagtcccgcaattatacatttaatacgcgatagaaaacaaaatatagcgcgcaaactaggataaattatcgcgcgcggtgtcatctatgttactagatcgatggatgggcacccagctttcttgtacaaagtggttcgataaacactagtaacggccgccagtgtgctggaattcgcccttcccaagctttgctctagatcaaactcacatccaaacataacatggatatcttccttaccaatcatactaattattttgggttaaatattaatcattatttttaagatattaattaagaaattaaaagattttttaaaaaaatgtataaaattatattattcatgatttttcatacatttgattttgataataaatatattttttttaatttcttaaaaaatgttgcaagacacttattagacatagtcttgttctgtttacaaaagcattcatcatttaatacattaaaaaatatttaatactaacagtagaatcttcttgtgagtggtgtgggagtaggcaacctggcattgaaacgagagaaagagagtcagaaccagaagacaaataaaaagtatgcaacaaacaaatcaaaatcaaagggcaaaggctggggttggctcaattggttgctacattcaattttcaactcagtcaacggttgagattcactctgacttccccaatctaagccgcggatgcaaacggttgaatctaacccacaatccaatctcgttacttaggggcttttccgtcattaactcacccctgccacccggtttccctataaattggaactcaatgctcccctctaaactcgtatcgcttcagagttgagaccaagacacactcgttcatatatctctctgctcttctcttctcttctacctctcaaggtacttttcttctccctctaccaaatcctagattccgtggttcaatttcggatcttgcacttctggtttgctttgccttgctttttcctcaactgggtccatctaggatccatgtgaaactctactctttctttaatatctgcggaatacgcgtttgactttcagatctagtcgaaatcatttcataattgcctttctttcttttagcttatgagaaataaaatcactttttttttatttcaaaataaaccttgggccttgtgctgactgagatggggtttggtgattacagaattttagcgaattttgtaattgtacttgtttgtctgtagttttgttttgttttcttgtttctcatacattccttaggcttcaattttattcgagtataggtcacaataggaattcaaactttgagcaggggaattaatcccttccttcaaatccagtttgtttgtatatatgtttaaaaaatgaaacttttgctttaaattctattataactttttttatggctgaaatttttgcatgtgtctttgctctctgttgtaaatttactgtttaggtactaactctaggcttgttgtgcagtttttgaagtataacaacagaagttcctattccgaagttcctattctctagaaagtataggaacttccaccacacaacacaatggcggccaccgcttccagaaccacccgattctcttcttcctcttcacaccccaccttccccaaacgcattactagatccaccctccctctctctcatcaaaccctcaccaaacccaaccacgctctcaaaatcaaatgttccatctccaaaccccccacggcggcgcccttcaccaaggaagcgccgaccacggagcccttcgtgtcacggttcgcctccggcgaacctcgcaagggcgcggacatccttgtggaggcgctggagaggcagggcgtgacgacggtgttcgcgtaccccggcggtgcgtcgatggagatccaccaggcgctcacgcgctccgccgccatccgcaacgtgctcccgcgccacgagcagggcggcgtcttcgccgccgaaggctacgcgcgttcctccggcctccccggcgtctgcattgccacctccggccccggcgccaccaacctcgtgagcggcctcgccgacgctttaatggacagcgtcccagtcgtcgccatcaccggccaggtcgcccgccggatgatcggcaccgacgccttccaagaaaccccgatcgtggaggtgagcagatccatcacgaagcacaactacctcatcctcgacgtcgacgacatcccccgcgtcgtcgccgaggctttcttcgtcgccacctccggccgccccggtccggtcctcatcgacattcccaaagacgttcagcagcaactcgccgtgcctaattgggacgagcccgttaacctccccggttacctcgccaggctgcccaggccccccgccgaggcccaattggaacacattgtcagactcatcatggaggcccaaaagcccgttctctacgtcggcggtggcagtttgaattccagtgctgaattgaggcgctttgttgaactcactggtattcccgttgctagcactttaatgggtcttggaacttttcctattggtgatgaatattcccttcagatgctgggtatgcatggtactgtttatgctaactatgctgttgacaatagtgatttgttgcttgcctttggggtaaggtttgatgaccgtgttactgggaagcttgaggcttttgctagtagggctaagattgttcacattgatattgattctgccgagattgggaagaacaagcaggcgcacgtgtcggtttgcgcggatttgaagttggccttgaagggaattaatatgattttggaggagaaaggagtggagggtaagtttgatcttggaggttggagagaagagattaatgtgcagaaacacaagtttccattgggttacaagacattccaggacgcgatttctccgcagcatgctatcgaggttcttgatgagttgactaatggagatgctattgttagtactggggttgggcagcatcaaatgtgggctgcgcagttttacaagtacaagagaccgaggcagtggttgacctcagggggtcttggagccatgggttttggattgcctgcggctattggtgctgctgttgctaaccctggggctgttgtggttgacattgatggggatggtagtttcatcatgaatgttcaggagttggccactataagagtggagaatctcccagttaagatattgttgttgaacaatcagcatttgggtatggtggttcagttggaggataggttctacaagtccaatagagctcacacctatcttggagatccgtctagcgagagcgagatattcccaaacatgctcaagtttgctgatgcttgtgggataccggcagcgcgagtgacgaagaaggaagagcttagagcggcaattcagagaatgttggacacccctggcccctaccttcttgatgtcattgtgccccatcaggagcatgtgttgccgatgattcccagtaatggatccttcaaggatgtgataactgagggtgatggtagaacgaggtactgattgcctagaccaaatgttccttgatgcttgttttgtacaatatatataagataatgctgtcctagttgcaggatttggcctgtggtgagcatcatagtctgtagtagttttggtagcaagacattttattttccttttatttaacttactacatgcagtagcatctatctatctctgtagtctgatatctcctgttgtctgtattgtgccgttggattttttgctgtagtgagactgaaaatgatgtgctagtaataatatttctgttagaaatctaagtagagaatctgttgaagaagtcaaaagctaatggaatcaggttacatattcaatgtttttctttttttagcggttggtagacgtgtagattcaacttctcttggagctcacctaggcaatcagtaaaatgcatattccttttttaacttgccatttatttacttttagtggaaattgtgaccaatttgttcatgtagaacggatttggaccattgcgtccacaaaacgtctcttttgctcgatcttcacaaagcgataccgaaatccagagatagttttcaaaagtcagaaatggcaaagttataaatagtaaaacagaatagatgctgtaatcgacttcaataacaagtggcatcacgtttctagttctagacccatcagctgggccggcccagctgatgatcccggtgaagttcctattccgaagttcctattctccagaaagtataggaacttcactagagcttgcggccgcgcatgctgacttaatcagctaacgccactcgagggggggcccggtaccgg

SEQ ID NO: 847 - DNA, 14225 bp, Artificial Sequence
  Construct containing artificial microRNA
cgcgccggtacccgggtaccgagctcactagacgcggtgaaattacctaattaacaccggtgtttatcaaacaagtttgtacaaaaaagcaggctccggccagaatggcccggaccgggttaccgaattctagaaatccgtcaacatggtggagcacgacactctcgtctactccaagaatatcaaagatacagtctcagaagaccaaagggctattgagacttttcaacaaagggtaatatcgggaaacctcctcggattccattgcccagctatctgtcacttcatcaaaaggacagtagaaaaggaaggtggcacctacaaatgccatcattgcgataaaggaaaggctatcgttcaagatgcctctgccgacagtggtcccaaagatggacccccacccacgaggagcatcgtggaaaaagaagacgttccaaccacgtcttcaaagcaagtggattgatgtgatatctccactgacgtaagggatgacgcacaatcccactagactctatcagtgatagagtgtatataagactctatcagtgatagagtgaactctatcagtgatagagttgtacttatttttacaacaattaccaacaacaacaaacaacaaacaacattacaattactatttacaattacagtcgacccgggatccaccatgtccaacctgctcacggttcaccagaaccttccggctcttccagtggacgcgacgtccgatgaagtcaggaagaacctcatggacatgttccgcgacaggcaagcgttcagcgagcacacctggaagatgctgctctccgtctgccgctcctgggctgcatggtgcaagctgaacaacaggaagtggttccccgctgagcccgaggacgtgagggattaccttctgtacctgcaagcgcgaggtttgtttctgcttctacctttgatatatatataataattatcattaattagtagtaatataatatttcaaatatttttttcaaaataaaagaatgtagtatatagcaattgcttttctgtagtttataagtgtgtatattttaatttataacttttctaatatatgaccaaaacatggtgatgcctaggtctggcagtgaagaccatccagcaacaccttggacaactgaacatgcttcacaggcgctccggcctcccgcgccccagcgactcgaacgccgtgagcctcgtcatgcgccgcatcaggaaggaaaacgtcgatgccggcgaaagggcaaagcaggccctcgcgttcgagaggaccgatttcgaccaggtccgcagcctgatggagaacagcgacaggtgccaggacattaggaacctggcgttcctcggaattgcatacaacacgctcctcaggatcgcggaaattgcccgcattcgcgtgaaggacattagccgcaccgacggcggcaggatgcttatccacattggcaggaccaagacgctcgtttccaccgcaggcgtcgaaaaggccctcagcctcggagtgaccaagctcgtcgaacgctggatctccgtgtccggcgtcgcggacgacccaaacaactacctcttctgccgcgtccgcaagaacggggtggctgcccctagcgccaccagccaactcagcacgagggccttggaaggtattttcgaggccacccaccgcctgatctacggcgcgaaggatgacagcggtcaacgctacctcgcatggtccgggcactccgcccgcgttggagctgctagggacatggcccgcgccggtgtttccatccccgaaatcatgcaggcgggtggatggacgaacgtgaacattgtcatgaactacattcgcaaccttgacagcgagacgggcgcaatggttcgcctcctggaagatggtgactgaggtacctaaagaaggagtgcgtcgaagcagatcgttcaaacatttggcaataaagtttcttaagattgaatcctgttgccggtcttgcgatgattatcatataatttctgttgaattacgttaagcatgtaataattaacatgtaatgcatgacgttatttatgagatgggtttttatgattagagtcccgcaattatacatttaatacgcgatagaaaacaaaatatagcgcgcaaactaggataaattatcgcgcgcggtgtcatctatgttactagatcggctcgactctagaggatcctcatcgctatcaactttgtatagaaaagttgggcccgaagttcctattccgaagttcctattctctagaaagtataggaacttcccataggattggcccggggctagcggatccttcgtccacagacatcaacatcttatcgtcctttgaagataagataataatgttgaagataagagtgggagccaccactaaaacattgctttgtcaaaagctaaaaaagatgatgcccgacagccacttgtgtgaagcatgagaagccggtccctccactaagaaaattagtgaagcatcttccagtggtccctccactcacagctcaatcagtgagcaacaggacgaaggaaatgacgtaagccatgacgtctaatcccacaagaatttccttatataaggaacacaaatcagaaggaagagatcaatcgaaatcaaaatcggaatcgaaatcaaaatcggaatcgaaatctctcatctaagatcactagtataacttcgtatagcatacattatacgaagttataagcttttacaagtttgtacaaaaaagcaggctccataggattggggccagaatggcccactcgacgatccaattccaatcccacaaaaatctgagcttaacagcacagttgctcctctcagagcagaatcgggtattcaacaccctcatatcaactactacgttgtgtataacggtccacatgccggtatatacgatgactggggttgtacaaaggcggcaacaaacggcgttcccggagttgcacacaagaaatttgccactattacagaggcaagagcagcagctgacgcgtacacaacaagtcagcaaacagacaggttgaacttcatccccaaaggagaagctcaactcaagcccaagagctttgctaaggccctaacaagcccaccaaagcaaaaagcccactggctcacgctaggaaccaaaaggcccagcagtgatccagccccaaaagagatctcctttgccccggagattacaatggacgatttcctctatctttacgatctaggaaggaagttcgaaggtgaaggtgacgacactatgttcaccactgataatgagaaggttagcctcttcaatttcagaaagaatgctgacccacagatggttagagaggcctacgcagcaggtctcatcaagacgatctacccgagtaacaatctccaggagatcaaataccttcccaagaaggttaaagatgcagtcaaaagattcaggactaattgcatcaagaacacagagaaagacatatttctcaagatcagaagtactattccagtatggacgattcaaggcttgcttcataaaccaaggcaagtaatagagattggagtctctaaaaaggtagttcctactgaatctaaggccatgcatggagtctaagattcaaatcgaggatctaacagaactcgccgtgaagactggcgaacagttcatacagagtcttttacgactcaatgacaagaagaaaatcttcgtcaacatggtggagcacgacactctggtctactccaaaaatgtcaaagatacagtctcagaagaccaaagggctattgagacttttcaacaaaggataatttcgggaaacctcctcggattccattgcccagctatctgtcacttcatcgaaaggacagtagaaaaggaaggtggctcctacaaatgccatcattgcgataaaggaaaggctatcattcaagatgcctctgccgacagtggtcccaaagatggacccccacccacgaggagcatcgtggaaaaagaagacgttccaaccacgtcttcaaagcaagtggattgatgtgacatctccactgacgtaagggatgacgcacaatcccactatccttcgcaagacccttcctctatataaggaagttcatttcatttggagaggacacgctcgagctcatttctctattacttcagccataacaaaagaactcttttctcttcttattaaaccatgaaaaagcctgaactcaccgcgacgtctgtcgagaagtttctgatcgaaaagttcgacagcgtctccgacctgatgcagctctcggagggcgaagaatctcgtgctttcagcttcgatgtaggagggcgtggatatgtcctgcgggtaaatagctgcgccgatggtttctacaaagatcgttatgtttatcggcactttgcatcggccgcgctcccgattccggaagtgcttgacattggggaattcagcgagagcctgacctattgcatctcccgccgtgcacagggtgtcacgttgcaagacctgcctgaaaccgaactgcccgctgttctgcagccggtcgcggaggccatggatgcgatcgctgcggccgatcttagccagacgagcgggttcggcccattcggaccgcaaggaatcggtcaatacactacatggcgtgatttcatatgcgcgattgctgatccccatgtgtatcactggcaaactgtgatggacgacaccgtcagtgcgtccgtcgcgcaggctctcgatgagctgatgctttgggccgaggactgccccgaagtccggcacctcgtgcacgcggatttcggctccaacaatgtcctgacggacaatggccgcataacagcggtcattgactggagcgaggcgatgttcggggattcccaatacgaggtcgccaacatcttcttctggaggccgtggttggcttgtatggagcagcagacgcgctacttcgagcggaggcatccggagcttgcaggatcgccgcggctccgggcgtatatgctccgcattggtcttgaccaactctatcagagcttggttgacggcaatttcgatgatgcagcttgggcgcagggtcgatgcgacgcaatcgtccgatccggagccgggactgtcgggcgtacacaaatcgcccgcagaagcgcggccgtctggaccgatggctgtgtagaagtactcgccgatagtggaaaccgacgccccagcactcgtccgagggcaaaggaatagtgaggtacctaaagaaggagtgcgtcgaagcagatcgttcaaacatttggcaataaagtttcttaagattgaatcctgttgccggtcttgcgatgattatcatataatttctgttgaattacgttaagcatgtaataattaacatgtaatgcatgacgttatttatgagatgggtttttatgattagagtcccgcaattatacatttaatacgcgatagaaaacaaaatatagcgcgcaaactaggataaattatcgcgcgcggtgtcatctatgttactagatcgatggtcggcctagaaggccacccagctttcttgtacaaagtggaactagtataacttcgtatagcatacattatacgaagttataagcttcaaaaaaaaaaaaaaccgcggccgcttctagctagctagggtttgggtagtgagtgtaataaagttgcaaagtttttggttaggttacgttttgaccttattattatagttcaaagggaaacattaattaaaggggattatgaagttcctcaacccaattccctcttgaggatcttactgggtgaattgagctgcttagctatggatcccacagttctacccatcaataagtgcttttgtggtagtcttgtggcttccatatctggggagcttcatttgcctttatagtattaaccttctgagggaaaagggttgaggaacacccttctcttcttttctctcataataatttaaatttgttatagactctaaactttaaatgttttttttgaagtttttccgtttttctcttttgccatgatcccgttcttgctgtggagtaaccttgtccgaggtatgtgcatgattagatccatacttaatttgtgtgcatcacgaaggtgaggttgaaatgaactttgcttttttgaccttttaggaaagttcttttgttgcagtaatcaattttaattagttttaattgacactattacttttattgtcatctttgttagttttattgttgaattgagtgcatatttcctaggaaattctcttacctaacattttttatacagatctatgctcttggctcttgcccttactcttggccttgtgttggttatttgtctacatatttattgactggtcgatgagacatgtcacaattcttgggcttatttgttggtctaataaaaggagtgcttattgaaagatcaagacggagattcggttttatataaataaactaaagatgacatattagtgtgttgatgtctcttcaggataatttttgtttgaaataatatggtaatgtcttgtctaaatttgtgtacataattcttactgattttttggattgttggatttttataaacaaatctgcggccgctagcgcgctgcagtggtaccttgatatctgcgcgcatctcgtctctgttatgcttaagaagttcaatgtttcgtttcatgtaaaactttggtggtttgtgttttggggccttgtataatccctgatgaataagtgttctactatgtttccgttcctgttatctctttctttctaatgacaagtcgaacttcttctttatcatcgcttcgtttttattatctgtgcttcttttgtttaatacgcctgcaaagtgactcgactctgtttagtgcagttctgcgaaacttgtaaatagtccaattgttggcctctagtaatagatgtagcgaaagtgttgagctgttgggttctaaggatggcttgaacatgttaatcttttaggttctgagtatgatgaacattcgttgttgctaagaaatgcctgtaatgtcccacaaatgtagaaaatggttcgtacctttgtccaagcattgatatgtctgatgagaggaaactgcaagatactgagcttggtttaacgaaggagaggcagtttcttccttccaaagcatttcatttgacaatgccttgatcatcttaagtagagtttctgttgtggaaagtttgaaactttgaagaaacgactctcaagtaaattgatgatcacaagtgaaagtgtatgttacataagtggatatttcaccctttttccatcaatcaaaacatcatatagtaatccattggtttatacaaacatcaaaatacatttacctctgaaatgaggaaaaaaatgcaaagagatttttgaaaatttccaacaaatggagagaaaaaaaaaaaacaaagaattaaatcaatcagtacatttataaaggttatgagacctatatgacacttattggtcaagtggcagccattccatttctagctctaattctggtcaccgaattcaggcctcctagggaagttcctattccgaagttcctattctccagaaagtataggaacttcgtcgagtctagacccgggtttacttattttgtgggtatctatacttttattagatttttaatcaggctcctgatttctttttatttcgattgaattcctgaacttgtattattcagtagatcgaataaattataaaaagataaaatcataaaataatattttatcctatcaatcatattaaagcaatgaatatgtaaaattaatcttatctttattttaaaaaatcatataggtttagtatttttttaaaaataaagataggattagttttactattcactgcttattacttttaaaaaaatcataaaggtttagtatttttttaaaataaatataggaatagttttactattcactgctttaatagaaaaatagtttaaaatttaagatagttttaatcccagcatttgccacgtttgaacgtgagccgaaacgatgtcgttacattatcttaacctagctgaaacgatgtcgtcataatatcgccaaatgccaactggactacgtcgaacccacaaatcccacaaagcgcgtgaaatcaaatcgctcaaaccacaaaaaagaacaacgcgtttgttacacgctcaatcccacgcgagtagagcacagtaaccttcaaataagcgaatggggcataatcagaaatccgaaataaacctaggggcattatcggaaatgaaaagtagctcactcaatataaaaatctaggaaccctagttttcgttatcactctgtgctccctcgctctatttctcagtctctgtgtttgcggctgaggattccgaacgagtgaccttcttcgtttctcgcaaaggtaacagcctctgctcttgtctcttcgattcgatctatgcctgtctcttatttacgatgatgtttcttcggttatgtttttttatttatgctttatgctgttgatgttcggttgtttgtttcgctttgtttttgtggttcagttttttaggattcttttggtttttgaatcgattaatcggaagagattttcgagttatttggtgtgttggaggtgaatcttttttttgaggtcatagatctgttgtatttgtgttataaacatgcgactttgtatgattttttacgaggttatgatgttctggttgttttattatgaatctgttgagacagaaccatgatttttgttgatgttcgtttacactattaaaggtttgttttaacaggattaaaagttttttaagcatgttgaaggagtcttgtagatatgtaaccgtcgatagtttttttgtgggtttgttcacatgttatcaagcttaatcttttactatgtatgcgaccatatctggatccagcaaaggcgattttttaattccttgtgaaacttttgtaatatgaagttgaaattttgttattggtaaactataaatgtgtgaagttggagtatacctttaccttcttatttggctttgtgatagtttaatttatatgtattttgagttctgacttgtatttctttgaattgattctagtttaagtaatccatggccagactcgacaagagcaaggtgatcaacagcgcactggagctgctgaacgaggtcggaatcgaaggcctcacaacccgtaagctcgcccagaagctcggggttgagcagcctacattgtactggcacgtcaagaacaagcgagctctgctagacgctatggccattgagatgctcgatcgccacgctatacacttgttacccttggaaggggaaagctggcaagacttcttgaggaacaacgctaagtccatgagatgcgctttgctcagtcaccgtgatggagccaaggtctgtctaggtacgggcttcacggagcaacaatatgaaactgcggagaaccgccttgccttcctgacacaacaaggtttctcccttgagaacgccctctacgcatggcaagcagtggggatctacactctgggttgtgtcttgctggatcaagagctgcaagtcgctaaggaggagagggaaacacctactactgatagtatgccgccactggttcgacaagctctggaactcaaggatcaccaaggtgcagagccagccttcctgttcggccttgaactgatcataggcggattggagaagcagctgaagagtgaaagtgggtcttaatgataggcggccgctaaagaaggagtgcgtcgaagcagatcgttcaaacatttggcaataaagtttcttaagattgaatcctgttgccggtcttgcgatgattatcatataatttctgttgaattacgttaagcatgtaataattaacatgtaatgcatgacgttatttatgagatgggtttttatgattagagtcccgcaattatacatttaatacgcgatagaaaacaaaatatagcgcgcaaactaggataaattatcgcgcgcggtgtcatctatgttactagatcgatggatgggcacccagctttcttgtacaaagtggttcgataaacactagtaacggccgccagtgtgctggaattcgcccttcccaagctttgctctagatcaaactcacatccaaacataacatggatatcttccttaccaatcatactaattattttgggttaaatattaatcattatttttaagatattaattaagaaattaaaagattttttaaaaaaatgtataaaattatattattcatgatttttcatacatttgattttgataataaatatattttttttaatttcttaaaaaatgttgcaagacacttattagacatagtcttgttctgtttacaaaagcattcatcatttaatacattaaaaaatatttaatactaacagtagaatcttcttgtgagtggtgtgggagtaggcaacctggcattgaaacgagagaaagagagtcagaaccagaagacaaataaaaagtatgcaacaaacaaatcaaaatcaaagggcaaaggctggggttggctcaattggttgctacattcaattttcaactcagtcaacggttgagattcactctgacttccccaatctaagccgcggatgcaaacggttgaatctaacccacaatccaatctcgttacttaggggcttttccgtcattaactcacccctgccacccggtttccctataaattggaactcaatgctcccctctaaactcgtatcgcttcagagttgagaccaagacacactcgttcatatatctctctgctcttctcttctcttctacctctcaaggtacttttcttctccctctaccaaatcctagattccgtggttcaatttcggatcttgcacttctggtttgctttgccttgctttttcctcaactgggtccatctaggatccatgtgaaactctactctttctttaatatctgcggaatacgcgtttgactttcagatctagtcgaaatcatttcataattgcctttctttcttttagcttatgagaaataaaatcactttttttttatttcaaaataaaccttgggccttgtgctgactgagatggggtttggtgattacagaattttagcgaattttgtaattgtacttgtttgtctgtagttttgttttgttttcttgtttctcatacattccttaggcttcaattttattcgagtataggtcacaataggaattcaaactttgagcaggggaattaatcccttccttcaaatccagtttgtttgtatatatgtttaaaaaatgaaacttttgctttaaattctattataactttttttatggctgaaatttttgcatgtgtctttgctctctgttgtaaatttactgtttaggtactaactctaggcttgttgtgcagtttttgaagtataacaacagaagttcctattccgaagttcctattctctagaaagtataggaacttccaccacacaacacaatggcggccaccgcttccagaaccacccgattctcttcttcctcttcacaccccaccttccccaaacgcattactagatccaccctccctctctctcatcaaaccctcaccaaacccaaccacgctctcaaaatcaaatgttccatctccaaaccccccacggcggcgcccttcaccaaggaagcgccgaccacggagcccttcgtgtcacggttcgcctccggcgaacctcgcaagggcgcggacatccttgtggaggcgctggagaggcagggcgtgacgacggtgttcgcgtaccccggcggtgcgtcgatggagatccaccaggcgctcacgcgctccgccgccatccgcaacgtgctcccgcgccacgagcagggcggcgtcttcgccgccgaaggctacgcgcgttcctccggcctccccggcgtctgcattgccacctccggccccggcgccaccaacctcgtgagcggcctcgccgacgctttaatggacagcgtcccagtcgtcgccatcaccggccaggtcgcccgccggatgatcggcaccgacgccttccaagaaaccccgatcgtggaggtgagcagatccatcacgaagcacaactacctcatcctcgacgtcgacgacatcccccgcgtcgtcgccgaggctttcttcgtcgccacctccggccgccccggtccggtcctcatcgacattcccaaagacgttcagcagcaactcgccgtgcctaattgggacgagcccgttaacctccccggttacctcgccaggctgcccaggccccccgccgaggcccaattggaacacattgtcagactcatcatggaggcccaaaagcccgttctctacgtcggcggtggcagtttgaattccagtgctgaattgaggcgctttgttgaactcactggtattcccgttgctagcactttaatgggtcttggaacttttcctattggtgatgaatattcccttcagatgctgggtatgcatggtactgtttatgctaactatgctgttgacaatagtgatttgttgcttgcctttggggtaaggtttgatgaccgtgttactgggaagcttgaggcttttgctagtagggctaagattgttcacattgatattgattctgccgagattgggaagaacaagcaggcgcacgtgtcggtttgcgcggatttgaagttggccttgaagggaattaatatgattttggaggagaaaggagtggagggtaagtttgatcttggaggttggagagaagagattaatgtgcagaaacacaagtttccattgggttacaagacattccaggacgcgatttctccgcagcatgctatcgaggttcttgatgagttgactaatggagatgctattgttagtactggggttgggcagcatcaaatgtgggctgcgcagttttacaagtacaagagaccgaggcagtggttgacctcagggggtcttggagccatgggttttggattgcctgcggctattggtgctgctgttgctaaccctggggctgttgtggttgacattgatggggatggtagtttcatcatgaatgttcaggagttggccactataagagtggagaatctcccagttaagatattgttgttgaacaatcagcatttgggtatggtggttcagttggaggataggttctacaagtccaatagagctcacacctatcttggagatccgtctagcgagagcgagatattcccaaacatgctcaagtttgctgatgcttgtgggataccggcagcgcgagtgacgaagaaggaagagcttagagcggcaattcagagaatgttggacacccctggcccctaccttcttgatgtcattgtgccccatcaggagcatgtgttgccgatgattcccagtaatggatccttcaaggatgtgataactgagggtgatggtagaacgaggtactgattgcctagaccaaatgttccttgatgcttgttttgtacaatatatataagataatgctgtcctagttgcaggatttggcctgtggtgagcatcatagtctgtagtagttttggtagcaagacattttattttccttttatttaacttactacatgcagtagcatctatctatctctgtagtctgatatctcctgttgtctgtattgtgccgttggattttttgctgtagtgagactgaaaatgatgtgctagtaataatatttctgttagaaatctaagtagagaatctgttgaagaagtcaaaagctaatggaatcaggttacatattcaatgtttttctttttttagcggttggtagacgtgtagattcaacttctcttggagctcacctaggcaatcagtaaaatgcatattccttttttaacttgccatttatttacttttagtggaaattgtgaccaatttgttcatgtagaacggatttggaccattgcgtccacaaaacgtctcttttgctcgatcttcacaaagcgataccgaaatccagagatagttttcaaaagtcagaaatggcaaagttataaatagtaaaacagaatagatgctgtaatcgacttcaataacaagtggcatcacgtttctagttctagacccatcagctgggccggcccagctgatgatcccggtgaagttcctattccgaagttcctattctccagaaagtataggaacttcactagagcttgcggccgcgcatgctgacttaatcagctaacgccactcgagggggggcccggtaccgg

SEQ ID NO: 848 - DNA, 19 bp, Artificial Sequence
  Tet operator sequence
actctatcagtgatagagt

SEQ ID NO: 849 - DNA, 1497 bp, Oryza sativa
tcaaatcttttttccatctacatccaatttatcatgtcaaagaaatggtctacatacagctaaggagatttatcgacgaatagtagctagcatactcgaggtcattcatatgcttgagaagagagtcgggatagtccaaaataaaacaaaggtaagattacctggtcaaaagtgaaaacatcagttaaaaggtggtataaagtaaaatatcggtaataaaaggtggcccaaagtgaaatttactcttttctactattataaaaattgaggatgtttttgtcggtactttgatacgtcatttttgtatgaattggtttttaagtttattcgcttttggaaatgcatatctgtatttgagtcgggttttaagttcgtttgcttttgtaaatacagagggatttgtataagaaatatctttaaaaaaacccatatgctaatttgacataatttttgagaaaaatatatattcaggcgaattctcacaatgaacaataataagattaaaatagctttcccccgttgcagcgcatgggtattttttctagtaaaaataaaagataaacttagactcaaaacatttacaaaaacaacccctaaagttcctaaagcccaaagtgctatccacgatccatagcaagcccagcccaacccaacccaacccaacccaccccagtccagccaactggacaatagtctccacacccccccactatcaccgtgagttgtccgcacgcaccgcacgtctcgcagccaaaaaaaaaaaaagaaagaaaaaaaagaaaaagaaaaaacagcaggtgggtccgggtcgtgggggccggaaacgcgaggaggatcgcgagccagcgacgaggccggccctccctccgcttccaaagaaacgccccccatcgccactatatacatacccccccctctcctcccatccccccaaccctaccaccaccaccaccaccacctccacctcctcccccctcgctgccggacgacgagctcctcccccctccccctccgccgccgccgcgccggtaaccaccccgcccctctcctctttctttctccgttttttttttccgtctcggtctcgatctttggccttggtagtttgggtgggcgagaggcggcttcgtgcgcgcccagatcggtgcgcgggaggggcgggatctcgcggctggggctctcgccggcgtggatccggcccggatctcgcggggaatggggctctcggatgtagatctgcgatccgccgttgttgggggagatgatggggggtttaaaatttccgccatgctaaacaagatcaggaagaggggaaaagggcactatggtttatatttttatatatttctgctgcttcgtcaggcttagatgtgctagatctttctttcttctttttgtgggtagaatttgaatccctcagcattgttcatcggtagtttttcttttcatgatttgtgacaaatgcagcctcgtgcggagcttttttgtaggtagaag

SEQ ID NO: 850 - DNA, 1053 bp, Badnavirus sp.
gataaaaaggagttgatcataagaacagacagccaggccattgtagccttctacaagaagcaagcggatcacaagccttcaagaacgagatggcttatgttgattgattacattactgggctcggaatcaacgttaaatttgagcacattgacggaaaagaaaatgtcctagctgacactttatcaagattggtccaagttctaatcacaagggttcatcatccagcagagactcagctagttgaagccgtcatggaagtcctgagcaatccgaaaaaggaagccttggataaggtaaatcattttatctttctaacccaacaatggattgcagaacaaagaaaggagcatatggtgaacacactgctccagttggaagaacctcaactacactgcggctgcaaagatcacacaacaggagaaagaaggaacgccgttcttctccaaagtcacacctcagccaacccgtatagatggttctataagtgtgcacaagacagatgtcacacttggatttggaaggacatcctggaccagtatgctgaagattatgccgcttacaccaggattggacttgaggcacttagccttgaagactggttcgaagaaccagaacccgatccacctgacccagtggaccgccagaagatagaagatatcctggacctgcaagatgtcagcaatgacgattgaaagattcccaggatagccggcggacgtggtggacccagtctaggtgcgatgcttagtcacgcacgatgactctgtcggaaggcatctttactttcggcaaactttaataatactttaggaaaagtattgtacaagttaggtgcagaatcaataatgcacccagctttagtcttgtctactgaattattgtgtcggttgcattattggatgcctgcgtgcaccctaagcaatccccggctctcatctctataagaggagcctttgtattcagttgcaagcatgcaagtcacacactgcaagcttacttctgagcaaaaagagttttgagtgaaataaatttgaagttcccccttacatctt

SEQ ID NO: 851 - DNA, 384 bp, Mirabilis mosaic virus
ttcgtccacagacatcaacatcttatcgtcctttgaagataagataataatgttgaagataagagtgggagccaccactaaaacattgctttgtcaaaagctaaaaaagatgatgcccgacagccacttgtgtgaagcatgagaagccggtccctccactaagaaaattagtgaagcatcttccagtggtccctccactcacagctcaatcagtgagcaacaggacgaaggaaatgacgtaagccatgacgtctaatcccacaagaatttccttatataaggaacacaaatcagaaggaagagatcaatcgaaatcaaaatcggaatcgaaatcaaaatcggaatcgaaatctctcatctaagagctcaaaaaaaaaaaaaacc

SEQ ID NO: 852 - DNA, 660 bp, Mirabilis mosaic virus
ccaattcgtcaacttcgtccacagacatcaacatcttatcgtcctttgaagataagataataatgttgaagataagagtgggagcccccactaaaacattgctttgtcaaaagctaaaaaagatgatgcccgacagccacttgtgtgaagcatgagaagccggtccctccactaagaaaattagtgaagcatcttccagtggtccctccactcacagctcaatcagtgagcaacaggacgaaggaaatgacgtaagccatgacgtctaatcccaacttcgtccacagacatcaacatcttatcgtcctttgaagataagataataatgttgaagataagagtgggagccaccactaaaacattgctttgtcaaaagctaaaaaagatgatgcccgacagccacttgtgtgaagcatgagaagccggtccctccactaagaaaattagtgaagcatcttccagtggtccctccactcacagctcaatcagtgagcaacaggacgaaggaaatgacgtaagccatgacgtctaatcccacaagaatttccttatataaggaacacaaatcagaaggaagagatcaatcgaaatcaaaatcggaatcgaaatcaaaatcggaatcgaaatctctcatctaagagctcaaaaaaaaaaaaaacc

SEQ ID NO: 853 - DNA, 998 bp, Zea mays
gccatcatcaccctaccccgagctgactcgggccgcagggaaccagaccggtgtcccatctggctagctccgccagataggcaatgaaggcgccccgcatgctctgtgacgacggtggctctcatcccccttacggaagcaagaggacgtcagcaaggacccaaccgctccgacagttgtccctccgccaggctccatcgctcctccgacggccacgacatcgcaccagctgggtgccaaaatctctccggctgccacgacggcatgtacttagggcgctagctctcccccgctagacacgtagcactctgctacaccccccattgtacacctggatcctctccttacacctataaaaggaaggaccagggccctctcagagaaggttggccgcgcggggacgaggacgagacaggcgctcgcttggggccgctcgctccctctcccacgtggacgcttgtaaccccctactgcaagcgcacccgatctgggcgcgggacgaacacgaaggctgcgggattcccacctctctcacgccggtctccggccgcctcgctctccccccttcgcgctcgccctcgcgctcgatccatctgggctggggcacgcggcgacactcactcgtcggcccaagggacccccggtctcgaaacgccgacaatatgatatatagaaactataatgatacacatgcaattaactagtgctgataatatatttacactgtagatttttccgataagtagaaaccaaatatttcaccgccacaaaaggcttcatcccatcagttacccatgtagcaaaaccaaaatacttgtgtgcgagaggccaagagcccaaaccaccgccaaggaaacccccagcccaccaggcgccttcctctataaataccctaactccggtggccgaagttcctcacccattcactcactcatctcaaggcctaggtagcaccgtagcagctactagaagcagctagccagaacaactcgtccatg

SEQ ID NO: 854 - DNA, 1502 bp, Glycine max
gggtttacttattttgtgggtatctatacttttattagatttttaatcaggctcctgatttctttttatttcgattgaattcctgaacttgtattattcagtagatcgaataaattataaaaagataaaatcataaaataatattttatcctatcaatcatattaaagcaatgaatatgtaaaattaatcttatctttattttaaaaaatcatataggtttagtatttttttaaaaataaagataggattagttttactattcactgcttattacttttaaaaaaatcataaaggtttagtatttttttaaaataaatataggaatagttttactattcactgctttaatagaaaaatagtttaaaatttaagatagttttaatcccagcatttgccacgtttgaacgtgagccgaaacgatgtcgttacattatcttaacctagctgaaacgatgtcgtcataatatcgccaaatgccaactggactacgtcgaacccacaaatcccacaaagcgcgtgaaatcaaatcgctcaaaccacaaaaaagaacaacgcgtttgttacacgctcaatcccacgcgagtagagcacagtaaccttcaaataagcgaatggggcataatcagaaatccgaaataaacctaggggcattatcggaaatgaaaagtagctcactcaatataaaaatctaggaaccctagttttcgttatcactctgtgctccctcgctctatttctcagtctctgtgtttgcggctgaggattccgaacgagtgaccttcttcgtttctcgcaaaggtaacagcctctgctcttgtctcttcgattcgatctatgcctgtctcttatttacgatgatgtttcttcggttatgtttttttatttatgctttatgctgttgatgttcggttgtttgtttcgctttgtttttgtggttcagttttttaggattcttttggtttttgaatcgattaatcggaagagattttcgagttatttggtgtgttggaggtgaatcttttttttgaggtcatagatctgttgtatttgtgttataaacatgcgactttgtatgattttttacgaggttatgatgttctggttgttttattatgaatctgttgagacagaaccatgatttttgttgatgttcgtttacactattaaaggtttgttttaacaggattaaaagttttttaagcatgttgaaggagtcttgtagatatgtaaccgtcgatagtttttttgtgggtttgttcacatgttatcaagcttaatcttttactatgtatgcgaccatatctggatccagcaaaggcgattttttaattccttgtgaaacttttgtaatatgaagttgaaattttgttattggtaaactataaatgtgtgaagttggagtatacctttaccttcttatttggctttgtgatagtttaatttatatgtattttgagttctgacttgtatttctttgaattgattctagtttaagtaatcc

SEQ ID NO: 855 - DNA, 1497 bp, Artificial Sequence
  Actin promoter engineered with tet operators
tcaaatcttttttccatctacatccaatttatcatgtcaaagaaatggtctacatacagctaaggagatttatcgacgaatagtagctagcatactcgaggtcattcatatgcttgagaagagagtcgggatagtccaaaataaaacaaaggtaagattacctggtcaaaagtgaaaacatcagttaaaaggtggtataaagtaaaatatcggtaataaaaggtggcccaaagtgaaatttactcttttctactattataaaaattgaggatgtttttgtcggtactttgatacgtcatttttgtatgaattggtttttaagtttattcgcttttggaaatgcatatctgtatttgagtcgggttttaagttcgtttgcttttgtaaatacagagggatttgtataagaaatatctttaaaaaaacccatatgctaatttgacataatttttgagaaaaatatatattcaggcgaattctcacaatgaacaataataagattaaaatagctttcccccgttgcagcgcatgggtattttttctagtaaaaataaaagataaacttagactcaaaacatttacaaaaacaacccctaaagttcctaaagcccaaagtgctatccacgatccatagcaagcccagcccaacccaacccaacccaacccaccccagtccagccaactggacaatagtctccacacccccccactatcaccgtgagttgtccgcacgcaccgcacgtctcgcagccaaaaaaaaaaaaagaaagaaaaaaaagaaaaagaaaaaacagcaggtgggtccgggtcgtgggggccggaaacgcgaggaggatcgcgagccagcgacgaggccggccctccctccgcttccaactctatcagtgatagagtcactatatactctatcagtgatagagtcccatccccccaaccctaccactctatcagtgatagagtccacctcctcccccctcgctgccggacgacgagctcctcccccctccccctccgccgccgccgcgccggtaaccaccccgcccctctcctctttctttctccgttttttttttccgtctcggtctcgatctttggccttggtagtttgggtgggcgagaggcggcttcgtgcgcgcccagatcggtgcgcgggaggggcgggatctcgcggctggggctctcgccggcgtggatccggcccggatctcgcggggaatggggctctcggatgtagatctgcgatccgccgttgttgggggagatgatggggggtttaaaatttccgccatgctaaacaagatcaggaagaggggaaaagggcactatggtttatatttttatatatttctgctgcttcgtcaggcttagatgtgctagatctttctttcttctttttgtgggtagaatttgaatccctcagcattgttcatcggtagtttttcttttcatgatttgtgacaaatgcagcctcgtgcggagcttttttgtaggtagaag

SEQ ID NO: 856 - DNA, 1051 bp, Artificial Sequence
  BSV promoter engineered with tet operators
gataaaaaggagttgatcataagaacagacagccaggccattgtagccttctacaagaagcaagcggatcacaagccttcaagaacgagatggcttatgttgattgattacattactgggctcggaatcaacgttaaatttgagcacattgacggaaaagaaaatgtcctagctgacactttatcaagattggtccaagttctaatcacaagggttcatcatccagcagagactcagctagttgaagccgtcatggaagtcctgagcaatccgaaaaaggaagccttggataaggtaaatcattttatctttctaacccaacaatggattgcagaacaaagaaaggagcatatggtgaacacactgctccagttggaagaacctcaactacactgcggctgcaaagatcacacaacaggagaaagaaggaacgccgttcttctccaaagtcacacctcagccaacccgtatagatggttctataagtgtgcacaagacagatgtcacacttggatttggaaggacatcctggaccagtatgctgaagattatgccgcttacaccaggattggacttgaggcacttagccttgaagactggttcgaagaaccagaacccgatccacctgacccagtggaccgccagaagatagaagatatcctggacctgcaagatgtcagcaatgacgattgaaagattcccaggatagccggcggacgtggtggacccagtctaggtgcgatgcttagtcacgcacgatgactctgtcggaaggcatctttactttcggcaaactttaataatactttaggaaaagtattgtacaagttaggtgcagaatcaataatgcacccagctttagtcttgtctactgaattattgtgtcggttgcattattggatgcctgcgtgcaccctaactctatcagtgatagagtctctataagactctatcagtgatagagtgcaactctatcagtgatagaggcaagcttacttctgagcaaaaagagttttgagtgaaataaatttgaagttcccccttacatctt

SEQ ID NO: 857 - DNA, 414 bp, Artificial Sequence
  MMV promoter engineered with tet operators
ttcgtccacagacatcaacatcttatcgtcctttgaagataagataataatgttgaagataagagtgggagccaccactaaaacattgctttgtcaaaagctaaaaaagatgatgcccgacagccacttgtgtgaagcatgagaagccggtccctccactaagaaaattagtgaagcatcttccagtggtccctccactcacagctcaatcagtgagcaacaggacgaaggaaatgacgtaagccatgacgtctaatcccacactctatcagtgatagagtttatataagactctatcagtgatagagtgaactctatcagtgatagagtgagatcaatcgaaatcaaaatcggaatcgaaatcaaaatcggaatcgaaatctctcatctaagagctcaaaaaaaaaaaaaacc

SEQ ID NO: 858 - DNA, 693 bp, Artificial Sequence
  dMMV promoter engineered with tet operators
aaaccaattcgtcaacttcgtccacagacatcaacatcttatcgtcctttgaagataagataataatgttgaagataagagtgggagcccccactaaaacattgctttgtcaaaagctaaaaaagatgatgcccgacagccacttgtgtgaagcatgagaagccggtccctccactaagaaaattagtgaagcatcttccagtggtccctccactcacagctcaatcagtgagcaacaggacgaaggaaatgacgtaagccatgacgtctaatcccaacttcgtccacagacatcaacatcttatcgtcctttgaagataagataataatgttgaagataagagtgggagccaccactaaaacattgctttgtcaaaagctaaaaaagatgatgcccgacagccacttgtgtgaagcatgagaagccggtccctccactaagaaaattagtgaagcatcttccagtggtccctccactcacagctcaatcagtgagcaacaggacgaaggaaatgacgtaagccatgacgtctaatcccacactctatcagtgatagagtttatataagactctatcagtgatagagtgaactctatcagtgatagagtgagatcaatcgaaatcaaaatcggaatcgaaatcaaaatcggaatcgaaatctctcatctaagagctcaaaaaaaaaaaaaacc

SEQ ID NO: 859 - DNA, 997 bp, Artificial Sequence
  MP1 promoter engineered with tet operators
gggccatcatcaccctaccccgagctgactcgggccgcagggaaccagaccggtgtcccatctggctagctccgccagataggcaatgaaggcgccccgcatgctctgtgacgacggcggctctcagcccccttacggaagcaagaggacgtcagcaaggacccaaccgctccgacagctgtccctccgccaggctccatcgctcctccgacggccacgacatcgcaccagctgggtgccaaaatctctccggctgccacgacggcatgtacttagggcgctagctctcccccgctagacacgtagcactctgctacaccccccattgtacacctggatcctctccttacacctataaaaggaaggaccagggccctctcagagaaggttggccgcgcggggacgaggacgagacaggcgctcgcttggggccgctcgctccctctcccacgtggacgcttgtaaccccctactgcaagcgcacccgacctgggcgcgggacgaacacgaaggccgcgggattcccacctctctcacgccggtctccggccgcctcgctctccccccttcgcgctcgccctcgcgctcgatccatctaggctggggcacgcggcgacactcactcgtcggcccaagagacccccggtctcgaaacgccgacaatatgatatatagaaactataatgatacacatgcaattaactagtgctgataatatatttacactgtagatttttccgataagtagaaaccaaatatttcaccgccacaaaaggcttcatcccatcagttacccatgtagcaaaaccaaaatacttgtgtgcgagaggccaagagcccaaaccaccgccaaggaaacccccagcactctatcagtgatagagtataaatactctatcagtgatagagtaagttcctcacccattcactctatcagtgatagagttaggtagcaccgtagcagctactagaagcagctagccagagatccaccatg

SEQ ID NO: 860 - DNA, 1559 bp, Artificial Sequence
  EF1A promoter engineered with tet operators
gggtttacttattttgtgggtatctatacttttattagatttttaatcaggctcctgatttctttttatttcgattgaattcctgaacttgtattattcagtagatcgaataaattataaaaagataaaatcataaaataatattttatcctatcaatcatattaaagcaatgaatatgtaaaattaatcttatctttattttaaaaaatcatataggtttagtatttttttaaaaataaagataggattagttttactattcactgcttattacttttaaaaaaatcataaaggtttagtatttttttaaaataaatataggaatagttttactattcactgctttaatagaaaaatagtttaaaatttaagatagttttaatcccagcatttgccacgtttgaacgtgagccgaaacgatgtcgttacattatcttaacctagctgaaacgatgtcgtcataatatcgccaaatgccaactggactacgtcgaacccacaaatcccacaaagcgcgtgaaatcaaatcgctcaaaccacaaaaaagaacaacgcgtttgttacacgctcaatcccacgcgagtagagcacagtaaccttcaaataagcgaatggggcataatcagaaatccgaaataaacctaggggcattatcggaaatgaaaagtagctcactcaatataaaaatctaggaaccctagttttcgttatcactctatcagtgatagagtactctatcagtgatagagtactctgtgctccctcgctctatttctcagtctctgtgtttgcggctgaggattccgaacactctatcagtgatagagtgagtgaccttcttcgtttctcgcaaaggtaacagcctctgctcttgtctcttcgattcgatctatgcctgtctcttatttacgatgatgtttcttcggttatgtttttttatttatgctttatgctgttgatgttcggttgtttgtttcgctttgtttttgtggttcagttttttaggattcttttggtttttgaatcgattaatcggaagagattttcgagttatttggtgtgttggaggtgaatcttttttttgaggtcatagatctgttgtatttgtgttataaacatgcgactttgtatgattttttacgaggttatgatgttctggttgttttattatgaatctgttgagacagaaccatgatttttgttgatgttcgtttacactattaaaggtttgttttaacaggattaaaagttttttaagcatgttgaaggagtcttgtagatatgtaaccgtcgatagtttttttgtgggtttgttcacatgttatcaagcttaatcttttactatgtatgcgaccatatctggatccagcaaaggcgattttttaattccttgtgaaacttttgtaatatgaagttgaaattttgttattggtaaactataaatgtgtgaagttggagtatacctttaccttcttatttggctttgtgatagtttaatttatatgtattttgagttctgacttgtatttctttgaattgattctagtttaagtaatcc

SEQ ID NO: 861 - DNA, 933 bp, Artificial Sequence
  35S CaMV promoter with ADH1 intron
agaagaccaaagggcaattgagacttttcaacaaagggtaatatcgggaaacctcctcggattccattgcccagctatctgtcacttcatcaaaaggacagtagaaaaggaaggtggcacctacaaatgccatcattgcgataaaggaaaggctatcgttcaagatgcctctgccgacagtggtcccaaagatggacccccacccacgaggagcatcgtggaaaaagaagacgttccaaccacgtcttcaaagcaagtggattgatgtgatatctccactgacgtaagggatgacgcacaatcccactatccttcgcaagacccttcctctatataaggaagttcatttcatttggagaggacgacctgcaggtcgacggatcaagtgcaaaggtccgccttgtttctcctctgtctcttgatctgactaatcttggtttatgattcgttgagtaattttggggaaagcttcgtccacagtttttttttcgatgaacagtgccgcagtggcgctgatcttgtatgctatcctgcaatcgtggtgaacttatttcttttatatccttcactcccatgaaaaggctagtaatctttctcgatgtaacatcgtccagcactgctattaccgtgtggtccatccgacagtctggctgaacacatcatacgatattgagcaaagatcgatctatcttccctgttctttaatgaaagacgtcattttcatcagtatgatctaagaatgttgcaacttgcaaggaggcgtttctttctttgaatttaactaactcgttgagtggccctgtttctcggacgtaaggcctttgctgctccacacatgtccattcgaattttaccgtgtttagcaagggcgaaaagtttgcatcttgatgatttagcttgactatgcgattgctttcctggacccgtgcagcc

SEQ ID NO: 862 - DNA, 1093 bp, Artificial Sequence
  35SCaMV promoter engineered with tet operators
gaaaatcttcgtcaacatggtggagcacgacacgcttgtctactccaaaaatatcaaagatacagtctcagaagaccaaagggcaattgagacttttcaacaaagggtaatatccggaaacctcctcggattccattgcccagctatctgtcactttattgtgaagatagtggaaaaggaaggtggctcctacaaatgccatcattgcgataaaggaaaggccatcgttgaagatgcctctgccgacagtggtcccaaagatggacccccacccacgaggagcatcgtggaaaaagaagacgttccaaccacgtcttcaaagcaagtggattgatgtgatatctccactgacgtaagggatgacgcacaatcccactagactctatcagtgatagagtgtatataagactctatcagtgatagagtgaactctatcagtgatagagttgtacttatttttacaacaattaccaacaacaacaaacaacaaacaacattacaattactatttacaattacagtcgacggatcaagtgcaaaggtccgccttgtttctcctctgtctcttgatctgactaatcttggtttatgattcgttgagtaattttggggaaagcttcgtccacagtttttttttcgatgaacagtgccgcagtggcgctgatcttgtatgctatcctgcaatcgtggtgaacttatttcttttatatccttcactcccatgaaaaggctagtaatctttctcgatgtaacatcgtccagcactgctattaccgtgtggtccatccgacagtctggctgaacacatcatacgatattgagcaaagatcgatctatcttccctgttctttaatgaaagacgtcattttcatcagtatgatctaagaatgttgcaacttgcaaggaggcgtttctttctttgaatttaactaactcgttgagtggccctgtttctcggacgtaaggcctttgctgctccacacatgtccattcgaattttaccgtgtttagcaagggcgaaaagtttgcatcttgatgatttagcttgactatgcgattgctttcctggacccgtgcagctgcggacggatcc

SEQ ID NO: 863 - protein, 207 aa, Artificial Sequence
  Sulfonylurea responsive repressor
MARLDKSKVINSALELLNEVGIEGLTTRKLAQKLGVEQPTLYWHVKNKRALLDAMAIEMFDRHATHYCPLEGESWQDFLRNKAKSMRNALLSHRDGAKVALGTGFTEQQYETAENCLAFLTQQGFSLENALYAFQAVGIYTLGCVLLDQELQVAKEERETPTTDSMPPLVRQAYELKDHQGAEPAFLFGLELIICGLEKQLKCESGS

SEQ ID NO: 864 - protein, 207 aa, Artificial Sequence
  Sulfonylurea responsive repressor
MARLDKSKVINSALELLNEVGIEGLTTRKLAQKLGVEQPTLYWHVKNKRALLDAMAIEMLDPHKIHYLPLEGESWQDFLRNRAKSMRNALLSHRDGAKVCLGTGFTERQYETAENTLAFLTQQGFSLENALYAFQAVGIYTLGCVLLDQELQVAKEERETPTTDSMPPLVRQAYELADHQGAEPAFLFGLELIISGLEKQLKAESGS

SEQ ID NO: 865 - protein, 207 aa, Artificial Sequence
  Sulfonylurea responsive repressor
MARLDKSKVINSALELLNEVGIEGLTTRKLAQKLGVEQPTLYWHVKNKRALLDEMAIEMLDPHKIHYLPLEGESWQDFLRNRAKSMRNALLSHRDGAKVCLGTGFTERQYETAENTLAFLTQQGFSLENALYAFQAVGIYTLGCVLLDQELQVAKEERETPTTDSMPPLVRQAYELADHQGAEPAFLFGLELIISGLEKQLKAESGS

SEQ ID NO: 866 - protein, 207 aa, Artificial Sequence
  Sulfonylurea responsive repressor
MARLDKSKVINSALELLNEVGIEGLTTRKLAQKLGVEQPTLYWHVKNKRALLDAMAIEILDPHKIHYLPLEGESWQDFLRNRAKSMRNALLSHRDGAKVCLGTGFTERQYETAENTLAFLTQQGFSLENALYAFQAVGIYTLGCVLLDQELQVAKEERETPTTDSMPPLVRQVYELADHQDAEPAFLFGLELIISGLEKQLKAESGS

SEQ ID NO: 867 - protein, 207 aa, Artificial Sequence
  Sulfonylurea responsive repressor
MARLDKSKVINSALELLNEVGIEGLTTRKLAQKLGVEQPTLYWHVKNKRALLDAMAIEMLDPHKIHYLPLEGESWQDYLRNRAKSMRNALLSHRDGAKVCLGTGFTERQYETAENTLAFLTQQGFSLENALYAFQAVGIYTLGCVLLDQELQVAKEERETPTTESMPPLVRQAYELADHQGTEPAFLFGLELIISGLEKQLKAESGS

SEQ ID NO: 868 - protein, 207 aa, Artificial Sequence
  Sulfonylurea responsive repressor
MARLDKSKVINSALELGNEVGIEGLTTRKLAQKLGVEQPTLYWHVKNKRALLDALAIEMHDRHQTHYLPLEGESWQDFLRNFAKSMRLALLSHRDGAKVSLGTRWTEQQYETAENMLAFLTQQGFSLENALYATDAVRVFTLGAVLLDQEQQVAKEERETPTPDSMPPLLRQAWELKVHQGAEPAFLFGLELIIAGLEKQLKRESGS

SEQ ID NO: 869 - protein, 207 aa, Artificial Sequence
  Sulfonylurea responsive repressor
MARLDKSKVINSALELLNEVGIEGLTTRKLAQKLGVEQPTLYWHVKNKRALLDALAIEMHDRHQTHYLPLEGESWQDFLRNFAKSMRRALLSHRDGAKVSLGTRWTEQQYETAENMLAFLTQQGFSLENALYATDAVRVFTLGAVLLDQEQQVAKEERETPTTDSMPPLLRQAWELKVHQGAEPAFLFGLELIIAGLEKQLKRESGS

SEQ ID NO: 870 - protein, 207 aa, Artificial Sequence
  Sulfonylurea responsive repressor
MARLDKSKVINSALELLNEVGIEGLTTRKLAQKLGVEQPTLYWHVKNKRALLDALAIEMHDRHQTHYLPLEGESWQDFLRNFAKSMRLALLSHRDGAKVSLGTRWTEQQYETAENMLAFLTQQGFSLENALYATDAVRVFTLGAVLLDQEQQVAKEERETPTPDSMPPLLRQAWELKVHQGAEPAFLFGLELIIAGLEKQLKRESGS

SEQ ID NO: 871 - DNA, 35 bp, Artificial Sequence
  Oligonucleotide
acacatctagaaaccatggccagactcgacaagag

SEQ ID NO: 872 - DNA, 43 bp, Artificial Sequence
  Oligonucleotide
tgtgtaagcttgttggtacctcacttgtacagctcatccatgc

SEQ ID NO: 873 - DNA, 48 bp, Artificial Sequence
  Oligonucleotide
ctgaagtgtgaaagtgggtctggatccgtgagcaagggcgccgagctg

SEQ ID NO: 874 - DNA, 48 bp, Artificial Sequence
  Oligonucleotide
cagctcggcgcccttgctcacggatccagacccactttcacacttcag

SEQ ID NO: 875 - DNA, 33 bp, Artificial Sequence
  Oligonucleotide
gctcacggatccagatccactttcacacttcag

SEQ ID NO: 876 - DNA, 33 bp, Artificial Sequence
  Oligonucleotide
gctcacggatccagacccactttcggccttcag

SEQ ID NO: 877 - DNA, 33 bp, Artificial Sequence
  Oligonucleotide
gctcacggatccagacccactttctctcttcag

SEQ ID NO: 878 - DNA, 38 bp, Artificial Sequence
  Oligonucleotide
cgattccgacctcgttccccagctccagtgcgctgttg

SEQ ID NO: 879 - DNA, 38 bp, Artificial Sequence
  Oligonucleotide
caacagcgcactggagctggggaacgaggtcggaatcg

SEQ ID NO: 880 - DNA, 35 bp, Artificial Sequence
  Oligonucleotide
ctaggtggaccttggctcgatcacggtgactgagc

SEQ ID NO: 881 - DNA, 35 bp, Artificial Sequence
  Oligonucleotide
gctcagtcaccgtgatcgagccaaggtccacctag

SEQ ID NO: 882 - DNA, 36 bp, Artificial Sequence
  Oligonucleotide
gctgaacgaggtcggagacgaaggcctcacaacccg

SEQ ID NO: 883 - DNA, 36 bp, Artificial Sequence
  Oligonucleotide
cgggttgtgaggccttcgtctccgacctcgttcagc

SEQ ID NO: 884 - protein, 207 aa, Artificial Sequence
  Sulfonylurea responsive repressor
MARLDKSKVINSALELGNEVGIEGLTTRKLAQKLGVEQPTLYWHVKNKRALLDAMAIEMFDRHATHYCPLEGESWQDFLRNKAKSMRNALLSHRDGAKVALGTGFTEQQYETAENCLAFLTQQGFSLENALYAFQAVGIYTLGCVLLDQELQVAKEERETPTTDSMPPLVRQAYELKDHQGAEPAFLFGLELIICGLEKQLKCESGS

SEQ ID NO: 885 - protein, 207 aa, Artificial Sequence
  Sulfonylurea responsive repressor
MARLDKSKVINSALELGNEVGIEGLTTRKLAQKLGVEQPTLYWHVKNKRALLDAMAIEMLDPHKIHYLPLEGESWQDFLRNRAKSMRNALLSHRDGAKVCLGTGFTERQYETAENTLAFLTQQGFSLENALYAFQAVGIYTLGCVLLDQELQVAKEERETPTTDSMPPLVRQAYELADHQGAEPAFLFGLELIISGLEKQLKAESGS

SEQ ID NO: 886 - protein, 207 aa, Artificial Sequence
  Sulfonylurea responsive repressor
MARLDKSKVINSALELGNEVGIEGLTTRKLAQKLGVEQPTLYWHVKNKRALLDEMAIEMLDPHKIHYLPLEGESWQDFLRNRAKSMRNALLSHRDGAKVCLGTGFTERQYETAENTLAFLTQQGFSLENALYAFQAVGIYTLGCVLLDQELQVAKEERETPTTDSMPPLVRQAYELADHQGAEPAFLFGLELIISGLEKQLKAESGS

SEQ ID NO: 887 - protein, 207 aa, Artificial Sequence
  Sulfonylurea responsive repressor
MARLDKSKVINSALELGNEVGIEGLTTRKLAQKLGVEQPTLYWHVKNKRALLDAMAIEILDPHKIHYLPLEGESWQDFLRNRAKSMRNALLSHRDGAKVCLGTGFTERQYETAENTLAFLTQQGFSLENALYAFQAVGIYTLGCVLLDQELQVAKEERETPTTDSMPPLVRQVYELADHQDAEPAFLFGLELIISGLEKQLKAESGS

SEQ ID NO: 888 - protein, 207 aa, Artificial Sequence
  Sulfonylurea responsive repressor
MARLDKSKVINSALELGNEVGIEGLTTRKLAQKLGVEQPTLYWHVKNKRALLDAMAIEMLDPHKIHYLPLEGESWQDYLRNRAKSMRNALLSHRDGAKVCLGTGFTERQYETAENTLAFLTQQGFSLENALYAFQAVGIYTLGCVLLDQELQVAKEERETPTTESMPPLVRQAYELADHQGTEPAFLFGLELIISGLEKQLKAESGS

SEQ ID NO: 889 - protein, 207 aa, Artificial Sequence
  Sulfonylurea responsive repressor
MARLDKSKVINSALELGNEVGIEGLTTRKLAQKLGVEQPTLYWHVKNKRALLDALAIEMHDRHQTHYLPLEGESWQDFLRNFAKSMRRALLSHRDGAKVSLGTRWTEQQYETAENMLAFLTQQGFSLENALYATDAVRVFTLGAVLLDQEQQVAKEERETPTTDSMPPLLRQAWELKVHQGAEPAFLFGLELIIAGLEKQLKRESGS

SEQ ID NO: 890 - DNA, 42 bp, Artificial Sequence
  Oligonucleotides
tggcacgtcaagaacaagcgagctctgctagacgctatggcc

SEQ ID NO: 891 - DNA, 42 bp, Artificial Sequence
  Oligonucleotides
atcgagatgctcgatcsccacgctatacactwcttacycttg

SEQ ID NO: 892 - DNA, 42 bp, Artificial Sequence
  Oligonucleotides
ttcgagatgctcgatcsccacgctatacactwcttacycttg

SEQ ID NO: 893 - DNA, 42 bp, Artificial Sequence
  Oligonucleotides
atcgagatgctcgatcsccacgctatacactwcwgtcycttg

SEQ ID NO: 894 - DNA, 42 bp, Artificial Sequence
  Oligonucleotides
ttcgagatgctcgatcsccacgctatacactwcwgtcycttg

SEQ ID NO: 895 - DNA, 42 bp, Artificial Sequence
  Oligonucleotides
atcgagatgctcgatcsccacgctatacacttgttacycttg

SEQ ID NO: 896 - DNA, 42 bp, Artificial Sequence
  Oligonucleotides
ttcgagatgctcgatcsccacgctatacacttgttacycttg

SEQ ID NO: 897 - DNA, 42 bp, Artificial Sequence
  Oligonucleotides
atcgagatgctcgatcsccacgctatacacttgwgtcycttg

SEQ ID NO: 898 - DNA, 42 bp, Artificial Sequence
  Oligonucleotides
ttcgagatgctcgatcsccacgctatacacttgwgtcycttg

SEQ ID NO: 899 - DNA, 42 bp, Artificial Sequence
  Oligonucleotides
atcgagatgctcgatcsccacgctmcccactwcttacycttg

SEQ ID NO: 900 - DNA, 42 bp, Artificial Sequence
  Oligonucleotides
ttcgagatgctcgatcsccacgctmcccactwcttacycttg

SEQ ID NO: 901 - DNA, 42 bp, Artificial Sequence
  Oligonucleotides
atcgagatgctcgatcsccacgctmcccactwcwgtcycttg

SEQ ID NO: 902 - DNA, 42 bp, Artificial Sequence
  Oligonucleotides
ttcgagatgctcgatcsccacgctmcccactwcwgtcycttg

SEQ ID NO: 903 - DNA, 42 bp, Artificial Sequence
  Oligonucleotides
atcgagatgctcgatcsccacgctmcccacttgttacycttg

SEQ ID NO: 904 - DNA, 42 bp, Artificial Sequence
  Oligonucleotides
ttcgagatgctcgatcsccacgctmcccacttgttacycttg

SEQ ID NO: 905 - DNA, 42 bp, Artificial Sequence
  Oligonucleotides
atcgagatgctcgatcsccacgctmcccacttgwgtcycttg

SEQ ID NO: 906 - DNA, 42 bp, Artificial Sequence
  Oligonucleotides
ttcgagatgctcgatcsccacgctmcccacttgwgtcycttg

SEQ ID NO: 907 - DNA, 42 bp, Artificial Sequence
  Oligonucleotides
gaaggggmaagctggcaagacttcttgaggaacaamgctaag

SEQ ID NO: 908 - DNA, 42 bp, Artificial Sequence
  Oligonucleotides
tccatgagaaacgctttgctcagtcaccgtgatggagccaag

SEQ ID NO: 909 - DNA, 42 bp, Artificial Sequence
  Oligonucleotides
tccatgagaygtgctttgctcagtcaccgtgatggagccaag

SEQ ID NO: 910 - DNA, 42 bp, Artificial Sequence
  Oligonucleotides
gcgtgtctaggtacgggcttmacggagcaaaactatgaaact

SEQ ID NO: 911 - DNA, 42 bp, Artificial Sequence
  Oligonucleotides
gtgtgtctaggtacgggcttmacggagcaaaactatgaaact

SEQ ID NO: 912 - DNA, 42 bp, Artificial Sequence
  Oligonucleotides
gcgtgtctaggtacgggcttmacggagcaacaatatgaaact

SEQ ID NO: 913 - DNA, 42 bp, Artificial Sequence
  Oligonucleotides
gtgtgtctaggtacgggcttmacggagcaacaatatgaaact

SEQ ID NO: 914 - DNA, 42 bp, Artificial Sequence
  Oligonucleotides
acggagaacmgccttgccttcctgtgtcaacaaggtttctcc

SEQ ID NO: 915 - DNA, 42 bp, Artificial Sequence
  Oligonucleotides
gcggagaacmgccttgccttcctgtgtcaacaaggtttctcc

SEQ ID NO: 916 - DNA, 42 bp, Artificial Sequence
  Oligonucleotides
acggagaacmgccttgccttcctgacgcaacaaggtttctcc

SEQ ID NO: 917 - DNA, 42 bp, Artificial Sequence
  Oligonucleotides
gcggagaacmgccttgccttcctgacgcaacaaggtttctcc

SEQ ID NO: 918 - DNA, 42 bp, Artificial Sequence
  Oligonucleotides
cttgagaacgccctctacgcatggcaagacstggggatctac

SEQ ID NO: 919 - DNA, 42 bp, Artificial Sequence
  Oligonucleotides
cttgagaacgccctctacgcatggcaakcastggggatctac

SEQ ID NO: 920 - DNA, 42 bp, Artificial Sequence
  Oligonucleotides
cttgagaacgccctctacgcaatgcaagacstggggatctac

SEQ ID NO: 921 - DNA, 42 bp, Artificial Sequence
  Oligonucleotides
cttgagaacgccctctacgcaatgcaakcastggggatctac

SEQ ID NO: 922 - DNA, 42 bp, Artificial Sequence
  Oligonucleotides
actctgggttgsgygttgctggatcaagagctgcaagtcgct

SEQ ID NO: 923 - DNA, 42 bp, Artificial Sequence
  Oligonucleotides
actctgggtkcggygttgctggatcaagagctgcaagtcgct

SEQ ID NO: 924 - DNA, 42 bp, Artificial Sequence
  Oligonucleotides
aaggaggagagggaaacacctactactgatagtawgccgcca

SEQ ID NO: 925 - DNA, 42 bp, Artificial Sequence
  Oligonucleotides
ctgrtacgacaagctctgaacctcaaggatcaccaaggtgca

SEQ ID NO: 926 - DNA, 42 bp, Artificial Sequence
  Oligonucleotides
ctgrtacgacaagctctggaactcaaggatcaccaaggtgca

SEQ ID NO: 927 - DNA, 42 bp, Artificial Sequence
  Oligonucleotides
gagcycgccttcctgttcggccttgaactgatcatagctgga

SEQ ID NO: 928 - DNA, 42 bp, Artificial Sequence
  Oligonucleotides
gagcycgccttcctgttcggccttgaactgatcatahgcgga

SEQ ID NO: 929 - DNA, 42 bp, Artificial Sequence
  Oligonucleotides
ttggagaagcagctgaaggctgaaagtgggtcttaatgatag

SEQ ID NO: 930 - DNA, 42 bp, Artificial Sequence
  Oligonucleotides
ttggagaagcagctgaaghgtgaaagtgggtcttaatgatag

SEQ ID NO: 931 - DNA, 42 bp, Artificial Sequence
  Oligonucleotides
gtggsgatcgagcatctcgawggccatagcgtctagcagagc

SEQ ID NO: 932 - DNA, 42 bp, Artificial Sequence
  Oligonucleotides
gtcttgccagcttkccccttccaagrgtaagwagtgtatagc

SEQ ID NO: 933 - DNA, 42 bp, Artificial Sequence
  Oligonucleotides
gtcttgccagcttkccccttccaagrgacwgwagtgtatagc

SEQ ID NO: 934 - DNA, 42 bp, Artificial Sequence
  Oligonucleotides
gtcttgccagcttkccccttccaagrgtaacaagtgtatagc

SEQ ID NO: 935 - DNA, 42 bp, Artificial Sequence
  Oligonucleotides
gtcttgccagcttkccccttccaagrgacwcaagtgtatagc

SEQ ID NO: 936 - DNA, 42 bp, Artificial Sequence
  Oligonucleotides
gtcttgccagcttkccccttccaagrgtaagwagtgggkagc

SEQ ID NO: 937 - DNA, 42 bp, Artificial Sequence
  Oligonucleotides
gtcttgccagcttkccccttccaagrgacwgwagtgggkagc

SEQ ID NO: 938 - DNA, 42 bp, Artificial Sequence
  Oligonucleotides
gtcttgccagcttkccccttccaagrgtaacaagtgggkagc

SEQ ID NO: 939 - DNA, 42 bp, Artificial Sequence
  Oligonucleotides
gtcttgccagcttkccccttccaagrgacwcaagtgggkagc

SEQ ID NO: 940 - DNA, 42 bp, Artificial Sequence
  Oligonucleotides
gagcaaagcgtttctcatggacttagckttgttcctcaagaa

SEQ ID NO: 941 - DNA, 42 bp, Artificial Sequence
  Oligonucleotides
gagcaaagcacrtctcatggacttagckttgttcctcaagaa

SEQ ID NO: 942 - DNA, 42 bp, Artificial Sequence
  Oligonucleotides
gaagcccgtacctagacacrccttggctccatcacggtgact

SEQ ID NO: 943 - DNA, 42 bp, Artificial Sequence
  Oligonucleotides
taagcccgtacctagacacrccttggctccatcacggtgact

SEQ ID NO: 944 - DNA, 42 bp, Artificial Sequence
  Oligonucleotides
gaaggcaaggckgttctccgyagtttcatagttttgctccgt

SEQ ID NO: 945 - DNA, 42 bp, Artificial Sequence
  Oligonucleotides
gaaggcaaggckgttctccgyagtttcatattgttgctccgt

SEQ ID NO: 946 - DNA, 42 bp, Artificial Sequence
  Oligonucleotides
tgcgtagagggcgttctcaagggagaaaccttgttgacacag

SEQ ID NO: 947 - DNA, 42 bp, Artificial Sequence
  Oligonucleotides
tgcgtagagggcgttctcaagggagaaaccttgttgcgtcag

SEQ ID NO: 948 - DNA, 42 bp, Artificial Sequence
  Oligonucleotides
cagcaacrcscaacccagagtgtagatccccasgtcttgcca

SEQ ID NO: 949 - DNA, 42 bp, Artificial Sequence
  Oligonucleotides
cagcaacrccgmacccagagtgtagatccccasgtcttgcca

SEQ ID NO: 950 - DNA, 42 bp, Artificial Sequence
  Oligonucleotides
cagcaacrcscaacccagagtgtagatccccastgmttgcca

SEQ ID NO: 951 - DNA, 42 bp, Artificial Sequence
  Oligonucleotides
cagcaacrccgmacccagagtgtagatccccastgmttgcca

SEQ ID NO: 952 - DNA, 42 bp, Artificial Sequence
  Oligonucleotides
cagcaacrcscaacccagagtgtagatccccasgtcttgcat

SEQ ID NO: 953 - DNA, 42 bp, Artificial Sequence
  Oligonucleotides
cagcaacrccgmacccagagtgtagatccccasgtcttgcat

SEQ ID NO: 954 - DNA, 42 bp, Artificial Sequence
  Oligonucleotides
cagcaacrcscaacccagagtgtagatccccastgmttgcat

SEQ ID NO: 955 - DNA, 42 bp, Artificial Sequence
  Oligonucleotides
cagcaacrccgmacccagagtgtagatccccastgmttgcat

SEQ ID NO: 956 - DNA, 42 bp, Artificial Sequence
  Oligonucleotides
aggtgtttccctctcctccttagcgacttgcagctcttgatc

SEQ ID NO: 957 - DNA, 42 bp, Artificial Sequence
  Oligonucleotides
gttcagagcttgtcgtaycagtggcggcwtactatcagtagt

SEQ ID NO: 958 - DNA, 42 bp, Artificial Sequence
  Oligonucleotides
ttccagagcttgtcgtaycagtggcggcwtactatcagtagt

SEQ ID NO: 959 - DNA, 42 bp, Artificial Sequence
  Oligonucleotides
gccgaacaggaaggcgrgctctgcaccttggtgatccttgag

SEQ ID NO: 960 - DNA, 42 bp, Artificial Sequence
  Oligonucleotides
agccttcagctgcttctccaatccagctatgatcagttcaag

SEQ ID NO: 961 - DNA, 42 bp, Artificial Sequence
  Oligonucleotides
acgcttcagctgcttctccaatccagctatgatcagttcaag

SEQ ID NO: 962 - DNA, 42 bp, Artificial Sequence
  Oligonucleotides
actcttcagctgcttctccaatccagctatgatcagttcaag

SEQ ID NO: 963 - DNA, 42 bp, Artificial Sequence
  Oligonucleotides
acacttcagctgcttctccaatccagctatgatcagttcaag

SEQ ID NO: 964 - DNA, 42 bp, Artificial Sequence
  Oligonucleotides
agccttcagctgcttctccaatccgcdtatgatcagttcaag

SEQ ID NO: 965 - DNA, 42 bp, Artificial Sequence
  Oligonucleotides
acgcttcagctgcttctccaatccgcdtatgatcagttcaag

SEQ ID NO: 966 - DNA, 42 bp, Artificial Sequence
  Oligonucleotides
actcttcagctgcttctccaatccgcdtatgatcagttcaag

SEQ ID NO: 967 - DNA, 42 bp, Artificial Sequence
  Oligonucleotides
acacttcagctgcttctccaatccgcdtatgatcagttcaag

SEQ ID NO: 968 - DNA, 42 bp, Artificial Sequence
  Oligonucleotides
gcgccaaggtaccttctgcagctatcattaagacccactttc

SEQ ID NO: 969 - DNA, 42 bp, Artificial Sequence; identical to SEQ ID NO: 890
  Oligonucleotides

SEQ ID NO: 970 - DNA, 42 bp, Artificial Sequence
  Oligonucleotides
attgagatgctcaacaggcacgctacccastacctacctttg

SEQ ID NO: 971 - DNA, 42 bp, Artificial Sequence
  Oligonucleotides
attgagatgctcaacaggcacgctacccastactstcctttg

SEQ ID NO: 972 - DNA, 42 bp, Artificial Sequence
  Oligonucleotides
attgagatgctcaacaggcacgctacctattacctacctttg

SEQ ID NO: 973 - DNA, 42 bp, Artificial Sequence
  Oligonucleotides
attgagatgctcaacaggcacgctacctattactstcctttg

SEQ ID NO: 974 - DNA, 42 bp, Artificial Sequence
  Oligonucleotides
attgagatgctcgakaggcacgctacccastacctacctttg

SEQ ID NO: 975 - DNA, 42 bp, Artificial Sequence
  Oligonucleotides
attgagatgctcgakaggcacgctacccastactstcctttg

SEQ ID NO: 976 - DNA, 42 bp, Artificial Sequence
  Oligonucleotides
attgagatgctcgakaggcacgctacctattacctacctttg

SEQ ID NO: 977 - DNA, 42 bp, Artificial Sequence
  Oligonucleotides
attgagatgctcgakaggcacgctacctattactstcctttg

SEQ ID NO: 978 - DNA, 42 bp, Artificial Sequence
  Oligonucleotides
gwgggggaaagctggcaaratttcttgaggaacaacgctaag

SEQ ID NO: 979 - DNA, 42 bp, Artificial Sequence
  Oligonucleotides
tccatgagaaatgctttgctcagtcaccgtgatggagccaag

SEQ ID NO: 980 - DNA, 42 bp, Artificial Sequence; identical to SEQ ID NO: 909
  Oligonucleotides

SEQ ID NO: 981 - DNA, 42 bp, Artificial Sequence
  Oligonucleotides
gtctgtctaggtacggsgdtcacggagaaccagtatgaaact

SEQ ID NO: 982 - DNA, 42 bp, Artificial Sequence
  Oligonucleotides
gtctgtctaggtacggsgdtcacggagcaacagtatgaaact

SEQ ID NO: 983 - DNA, 42 bp, Artificial Sequence
  Oligonucleotides
gtctgtctaggtacggsgtggacggagaaccagtatgaaact

SEQ ID NO: 984 - DNA, 42 bp, Artificial Sequence
  Oligonucleotides
gtctgtctaggtacggsgtggacggagcaacagtatgaaact

SEQ ID NO: 985 - DNA, 42 bp, Artificial Sequence
  Oligonucleotides
cttgagaactcacttgccttcctgtgccaacaaggtttctcc

SEQ ID NO: 986 - DNA, 42 bp, Artificial Sequence
  Oligonucleotides
gttgagaactcacttgccttcctgtgccaacaaggtttctcc

SEQ ID NO: 987 - DNA, 42 bp, Artificial Sequence
  Oligonucleotides
attgagaactcacttgccttcctgtgccaacaaggtttctcc

SEQ ID NO: 988 - DNA, 42 bp, Artificial Sequence
  Oligonucleotides
cttgagaactcacttgccttcctgacgcaacaaggtttctcc

SEQ ID NO: 989 - DNA, 42 bp, Artificial Sequence
  Oligonucleotides
gttgagaactcacttgccttcctgacgcaacaaggtttctcc

SEQ ID NO: 990 - DNA, 42 bp, Artificial Sequence
  Oligonucleotides
attgagaactcacttgccttcctgacgcaacaaggtttctcc

SEQ ID NO: 991 - DNA, 42 bp, Artificial Sequence
  Oligonucleotides
cttgagaaccagcttgccttcctgtgccaacaaggtttctcc

SEQ ID NO: 992 - DNA, 42 bp, Artificial Sequence
  Oligonucleotides
gttgagaaccagcttgccttcctgtgccaacaaggtttctcc

SEQ ID NO: 993 - DNA, 42 bp, Artificial Sequence
  Oligonucleotides
attgagaaccagcttgccttcctgtgccaacaaggtttctcc

SEQ ID NO: 994 - DNA, 42 bp, Artificial Sequence
  Oligonucleotides
cttgagaaccagcttgccttcctgacgcaacaaggtttctcc

SEQ ID NO: 995 - DNA, 42 bp, Artificial Sequence
  Oligonucleotides
gttgagaaccagcttgccttcctgacgcaacaaggtttctcc

SEQ ID NO: 996 - DNA, 42 bp, Artificial Sequence
  Oligonucleotides
attgagaaccagcttgccttcctgacgcaacaaggtttctcc

SEQ ID NO: 997 - DNA, 42 bp, Artificial Sequence
  Oligonucleotides
cttgagaacatgcttgccttcctgtgccaacaaggtttctcc

SEQ ID NO: 998 - DNA, 42 bp, Artificial Sequence
  Oligonucleotides
gttgagaacatgcttgccttcctgtgccaacaaggtttctcc

SEQ ID NO: 999 - DNA, 42 bp, Artificial Sequence
  Oligonucleotides
attgagaacatgcttgccttcctgtgccaacaaggtttctcc

SEQ ID NO: 1000 - DNA, 42 bp, Artificial Sequence
  Oligonucleotides
cttgagaacatgcttgccttcctgacgcaacaaggtttctcc

SEQ ID NO: 1001 - DNA, 42 bp, Artificial Sequence
  Oligonucleotides
gttgagaacatgcttgccttcctgacgcaacaaggtttctcc

SEQ ID NO: 1002 - DNA, 42 bp, Artificial Sequence
  Oligonucleotides
attgagaacatgcttgccttcctgacgcaacaaggtttctcc

SEQ ID NO: 1003 - DNA, 42 bp, Artificial Sequence
  Oligonucleotides
gccgagaactcacttgccttcctgtgccaacaaggtttctcc

SEQ ID NO: 1004 - DNA, 42 bp, Artificial Sequence
  Oligonucleotides
gccgagaactcacttgccttcctgacgcaacaaggtttctcc

SEQ ID NO: 1005 - DNA, 42 bp, Artificial Sequence
  Oligonucleotides
gccgagaaccagcttgccttcctgtgccaacaaggtttctcc

SEQ ID NO: 1006 - DNA, 42 bp, Artificial Sequence
  Oligonucleotides
gccgagaaccagcttgccttcctgacgcaacaaggtttctcc

SEQ ID NO: 1007 - DNA, 42 bp, Artificial Sequence
  Oligonucleotides
gccgagaacatgcttgccttcctgtgccaacaaggtttctcc

SEQ ID NO: 1008 - DNA, 42 bp, Artificial Sequence
  Oligonucleotides
gccgagaacatgcttgccttcctgacgcaacaaggtttctcc

SEQ ID NO: 1009 - DNA, 42 bp, Artificial Sequence
  Oligonucleotides
cttgagaatgccctctacgcaatgcrggctgttcggatctwc

SEQ ID NO: 1010 - DNA, 42 bp, Artificial Sequence
  Oligonucleotides
cttgagaatgccctctacgcaatgcrggctgttgscatctwc

SEQ ID NO: 1011 - DNA, 42 bp, Artificial Sequence
  Oligonucleotides
cttgagcawgccctctacgcaatgcrggctgttcggatctwc

SEQ ID NO: 1012 - DNA, 42 bp, Artificial Sequence
  Oligonucleotides
cttgagcawgccctctacgcaatgcrggctgttgscatctwc

SEQ ID NO: 1013 - DNA, 42 bp, Artificial Sequence
  Oligonucleotides
actctgggttscgtcttgtgggatcaagagctacaagtcgct

SEQ ID NO: 1014 - DNA, 42 bp, Artificial Sequence
  Oligonucleotides
actctgggttscgtcttgtgggatcaagagadgcaagtcgct

SEQ ID NO: 1015 - DNA, 42 bp, Artificial Sequence
  Oligonucleotides
actctgggttscgtcttgstagatcaagagctacaagtcgct

SEQ ID NO: 1016 - DNA, 42 bp, Artificial Sequence
  Oligonucleotides
actctgggttscgtcttgstagatcaagagadgcaagtcgct

SEQ ID NO: 1017 - DNA, 42 bp, Artificial Sequence
  Oligonucleotides
aaggaggagagggaaacacctactactgatagtatgccgcca

SEQ ID NO: 1018 - DNA, 42 bp, Artificial Sequence
  Oligonucleotides
aaggaggagagggaaacacctcagactgatagtatgccgcca

SEQ ID NO: 1019 - DNA, 42 bp, Artificial Sequence
  Oligonucleotides
ctggttcgacaagctktggaactccdggatcaccaaggtgca

SEQ ID NO: 1020 - DNA, 42 bp, Artificial Sequence
  Oligonucleotides
ctggttcgacaagctktggaactcaaagatcaccaaggtgca

SEQ ID NO: 1021 - DNA, 42 bp, Artificial Sequence
  Oligonucleotides
ctggttcgacaagcttgggaactccdggatcaccaaggtgca

SEQ ID NO: 1022 - DNA, 42 bp, Artificial Sequence
  Oligonucleotides
ctggttcgacaagcttgggaactcaaagatcaccaaggtgca

SEQ ID NO: 1023 - DNA, 42 bp, Artificial Sequence
  Oligonucleotides
grwccagmtttcctgttcggccttgaactgatcatagcagga

SEQ ID NO: 1024 - DNA, 42 bp, Artificial Sequence
  Oligonucleotides
grwccagmtttcctgttcggccttgaactgatcatahgcgga

SEQ ID NO: 1025 - DNA, 42 bp, Artificial Sequence
  Oligonucleotides
ttggagaagcagctgaaghgcgaaagtgggtcttaatgatag

SEQ ID NO: 1026 - DNA, 42 bp, Artificial Sequence
  Oligonucleotides
ttggagaagcagctgaaggcggaaagtgggtcttaatgatag

SEQ ID NO: 1027 - DNA, 42 bp, Artificial Sequence
  Oligonucleotides
gtgcctgttgagcatctcaatggccatagcgtctagcagagc

SEQ ID NO: 1028 - DNA, 42 bp, Artificial Sequence
  Oligonucleotides
gtgcctmtcgagcatctcaatggccatagcgtctagcagagc

SEQ ID NO: 1029 - DNA, 42 bp, Artificial Sequence
  Oligonucleotides
atyttgccagctttcccccwccaaaggtaggtastgggtagc

SEQ ID NO: 1030 - DNA, 42 bp, Artificial Sequence
  Oligonucleotides
atyttgccagctttcccccwccaaaggasagtastgggtagc

SEQ ID NO: 1031 - DNA, 42 bp, Artificial Sequence
  Oligonucleotides
atyttgccagctttcccccwccaaaggtaggtaataggtagc

SEQ ID NO: 1032 - DNA, 42 bp, Artificial Sequence
  Oligonucleotides
atyttgccagctttcccccwccaaaggasagtaataggtagc

SEQ ID NO: 1033 - DNA, 42 bp, Artificial Sequence
  Oligonucleotides
gagcaaagcatttctcatggacttagcgttgttcctcaagaa

SEQ ID NO: 1034 - DNA, 42 bp, Artificial Sequence
  Oligonucleotides
gagcaaagcacrtctcatggacttagcgttgttcctcaagaa

SEQ ID NO: 1035 - DNA, 42 bp, Artificial Sequence
  Oligonucleotides
gahcsccgtacctagacagaccttggctccatcacggtgact

SEQ ID NO: 1036 - DNA, 42 bp, Artificial Sequence
  Oligonucleotides
ccacsccgtacctagacagaccttggctccatcacggtgact

SEQ ID NO: 1037 - DNA, 42 bp, Artificial Sequence
  Oligonucleotides
gaaggcaagtgagttctcaabagtttcatactggttctccgt

SEQ ID NO: 1038 - DNA, 42 bp, Artificial Sequence
  Oligonucleotides
gaaggcaagctggttctcaabagtttcatactggttctccgt

SEQ ID NO: 1039 - DNA, 42 bp, Artificial Sequence
  Oligonucleotides
gaaggcaagcatgttctcaabagtttcatactggttctccgt

SEQ ID NO: 1040 - DNA, 42 bp, Artificial Sequence
  Oligonucleotides
gaaggcaagtgagttctcggcagtttcatactggttctccgt

SEQ ID NO: 1041 - DNA, 42 bp, Artificial Sequence
  Oligonucleotides
gaaggcaagctggttctcggcagtttcatactggttctccgt

SEQ ID NO: 1042 - DNA, 42 bp, Artificial Sequence
  Oligonucleotides
gaaggcaagcatgttctcggcagtttcatactggttctccgt

SEQ ID NO: 1043 - DNA, 42 bp, Artificial Sequence
  Oligonucleotides
gaaggcaagtgagttctcaabagtttcatactgttgctccgt

SEQ ID NO: 1044 - DNA, 42 bp, Artificial Sequence
  Oligonucleotides
gaaggcaagctggttctcaabagtttcatactgttgctccgt

SEQ ID NO: 1045 - DNA, 42 bp, Artificial Sequence
  Oligonucleotides
gaaggcaagcatgttctcaabagtttcatactgttgctccgt

SEQ ID NO: 1046 - DNA, 42 bp, Artificial Sequence
  Oligonucleotides
gaaggcaagtgagttctcggcagtttcatactgttgctccgt

SEQ ID NO: 1047 - DNA, 42 bp, Artificial Sequence
  Oligonucleotides
gaaggcaagctggttctcggcagtttcatactgttgctccgt

SEQ ID NO: 1048 - DNA, 42 bp, Artificial Sequence
  Oligonucleotides
gaaggcaagcatgttctcggcagtttcatactgttgctccgt

SEQ ID NO: 1049 - DNA, 42 bp, Artificial Sequence
  Oligonucleotides
tgcgtagagggcattctcaagggagaaaccttgttggcacag

SEQ ID NO: 1050 - DNA, 42 bp, Artificial Sequence
  Oligonucleotides
tgcgtagagggcwtgctcaagggagaaaccttgttggcacag

SEQ ID NO: 1051 - DNA, 42 bp, Artificial Sequence
  Oligonucleotides
tgcgtagagggcattctcaagggagaaaccttgttgcgtcag

SEQ ID NO: 1052 - DNA, 42 bp, Artificial Sequence
  Oligonucleotides
tgcgtagagggcwtgctcaagggagaaaccttgttgcgtcag

SEQ ID NO: 1053 - DNA, 42 bp, Artificial Sequence
  Oligonucleotides
ccacaagacgsaacccagagtgwagatccgaacagccygcat

SEQ ID NO: 1054 - DNA, 42 bp, Artificial Sequence
  Oligonucleotides
tascaagacgsaacccagagtgwagatccgaacagccygcat

SEQ ID NO: 1055 - DNA, 42 bp, Artificial Sequence
  Oligonucleotides
ccacaagacgsaacccagagtgwagatgscaacagccygcat

SEQ ID NO: 1056 - DNA, 42 bp, Artificial Sequence
  Oligonucleotides
tascaagacgsaacccagagtgwagatgscaacagccygcat

SEQ ID NO: 1057 - DNA, 42 bp, Artificial Sequence
  Oligonucleotides
aggtgtttccctctcctccttagcgacttgtagctcttgatc

SEQ ID NO: 1058 - DNA, 42 bp, Artificial Sequence
  Oligonucleotides
aggtgtttccctctcctccttagcgacttgchtctcttgatc

SEQ ID NO: 1059 - DNA, 42 bp, Artificial Sequence
  Oligonucleotides
ttccamagcttgtcgaaccagtggcggcatactatcagtagt

SEQ ID NO: 1060 - DNA, 42 bp, Artificial Sequence
  Oligonucleotides
ttcccaagcttgtcgaaccagtggcggcatactatcagtagt

SEQ ID NO: 1061 - DNA, 42 bp, Artificial Sequence
  Oligonucleotides
ttccamagcttgtcgaaccagtggcggcatactatcagtctg

SEQ ID NO: 1062 - DNA, 42 bp, Artificial Sequence
  Oligonucleotides
ttcccaagcttgtcgaaccagtggcggcatactatcagtctg

SEQ ID NO: 1063 - DNA, 42 bp, Artificial Sequence
  Oligonucleotides
gccgaacaggaaakctggwyctgcaccttggtgatcchggag

SEQ ID NO: 1064 - DNA, 42 bp, Artificial Sequence
  Oligonucleotides
gccgaacaggaaakctggwyctgcaccttggtgatctttgag

SEQ ID NO: 1065 - DNA, 42 bp, Artificial Sequence
  Oligonucleotides
gcdcttcagctgcttctccaatcctgctatgatcagttcaag

SEQ ID NO: 1066 - DNA, 42 bp, Artificial Sequence
  Oligonucleotides
cgccttcagctgcttctccaatcctgctatgatcagttcaag

SEQ ID NO: 1067 - DNA, 42 bp, Artificial Sequence
  Oligonucleotides
gcdcttcagctgcttctccaatccgcdtatgatcagttcaag

SEQ ID NO: 1068 - DNA, 42 bp, Artificial Sequence
  Oligonucleotides
cgccttcagctgcttctccaatccgcdtatgatcagttcaag

SEQ ID NO: 1069 - DNA, 42 bp, Artificial Sequence; identical to SEQ ID NO: 968
  Oligonucleotides

SEQ ID NO: 1070 - DNA, 42 bp, Artificial Sequence; identical to SEQ ID NO: 890
  Oligonucleotides

SEQ ID NO: 1071 - DNA, 42 bp, Artificial Sequence
  Oligonucleotides
attgagatgctcgataggcacgctacccactactstcctttg

SEQ ID NO: 1072 - DNA, 42 bp, Artificial Sequence
  Oligonucleotides
attgagatgctcgataggcacgctacccactacctacctttg

SEQ ID NO: 1073 - DNA, 42 bp, Artificial Sequence
  Oligonucleotides
gaaggggaaagctggcaagacttcttgaggaacaacgctaag

SEQ ID NO: 1074 - DNA, 42 bp, Artificial Sequence
  Oligonucleotides
tccatgagaygcgctttgctcagtcaccgtgatggagccaag

SEQ ID NO: 1075 - DNA, 42 bp, Artificial Sequence; identical to SEQ ID NO: 979
  Oligonucleotides

SEQ ID NO: 1076 - DNA, 42 bp, Artificial Sequence
  Oligonucleotides
gtctgtctaggtacgggcttcacggagcaacagtatgaaact

SEQ ID NO: 1077 - DNA, 42 bp, Artificial Sequence
  Oligonucleotides
gctgagaacagccttgccttcctgacacaacaaggtttctcc

SEQ ID NO: 1078 - DNA, 42 bp, Artificial Sequence
  Oligonucleotides
gctgagaacagccttgccttcctgtgtcaacaaggtttctcc

SEQ ID NO: 1079 - DNA, 42 bp, Artificial Sequence
  Oligonucleotides
cttgagaacgccctctacgcaatgcaagctgttgggatctac

SEQ ID NO: 1080 - DNA, 42 bp, Artificial Sequence
  Oligonucleotides
actctgggtwgtgtcttgctggatcaagagctgcaagtcgct

SEQ ID NO: 1081 - DNA, 42 bp, Artificial Sequence; identical to SEQ ID NO: 1017
  Oligonucleotides

SEQ ID NO: 1082 - DNA, 42 bp, Artificial Sequence
  Oligonucleotides
ctggttcgacaagctctggaactcaaggatcaccaaggtgca

SEQ ID NO: 1083 - DNA, 42 bp, Artificial Sequence
  Oligonucleotides
gagccagccttcctgttcggccttgaactgatcatagcagga

SEQ ID NO: 1084 - DNA, 42 bp, Artificial Sequence
  Oligonucleotides
gagccagccttcctgttcggccttgaactgatcatahgcgga

SEQ ID NO: 1085 - DNA, 42 bp, Artificial Sequence
  Oligonucleotides
ttggagaagcagctgaaggccgaaagtgggtcttaatgatag

SEQ ID NO: 1086 - DNA, 42 bp, Artificial Sequence; identical to SEQ ID NO: 930
  Oligonucleotides

SEQ ID NO: 1087 - DNA, 42 bp, Artificial Sequence
  Oligonucleotides
gtgcctatcgagcatctcaatggccatagcgtctagcagagc

SEQ ID NO: 1088 - DNA, 42 bp, Artificial Sequence
  Oligonucleotides
gtcttgccagctttccccttccaaaggasagtagtgggtagc

SEQ ID NO: 1089 - DNA, 42 bp, Artificial Sequence
  Oligonucleotides
gtcttgccagctttccccttccaaaggtaggtagtgggtagc

SEQ ID NO: 1090 - DNA, 42 bp, Artificial Sequence
  Oligonucleotides
gagcaaagcgcrtctcatggacttagcgttgttcctcaagaa

SEQ ID NO: 1091 - DNA, 42 bp, Artificial Sequence; identical to SEQ ID NO: 1033
  Oligonucleotides

SEQ ID NO: 1092 - DNA, 42 bp, Artificial Sequence
  Oligonucleotides
gaagcccgtacctagacagaccttggctccatcacggtgact

SEQ ID NO: 1093 - DNA, 42 bp, Artificial Sequence
  Oligonucleotides
gaaggcaaggctgttctcagcagtttcatactgttgctccgt

SEQ ID NO: 1094 - DNA, 42 bp, Artificial Sequence
  Oligonucleotides
tgcgtagagggcgttctcaagggagaaaccttgttgtgtcag

SEQ ID NO: 1095 - DNA, 42 bp, Artificial Sequence; identical to SEQ ID NO: 946
  Oligonucleotides

SEQ ID NO: 1096 - DNA, 42 bp, Artificial Sequence
  Oligonucleotides
cagcaagacacwacccagagtgtagatcccaacagcttgcat

SEQ ID NO: 1097 - DNA, 42 bp, Artificial Sequence; identical to SEQ ID NO: 956
  Oligonucleotides

SEQ ID NO: 1098 - DNA, 42 bp, Artificial Sequence
  Oligonucleotides
ttccagagcttgtcgaaccagtggcggcatactatcagtagt

SEQ ID NO: 1099 - DNA, 42 bp, Artificial Sequence
  Oligonucleotides
gccgaacaggaaggctggctctgcaccttggtgatccttgag

SEQ ID NO: 1100 - DNA, 42 bp, Artificial Sequence
  Oligonucleotides
ggccttcagctgcttctccaatcctgctatgatcagttcaag

SEQ ID NO: 1101 - DNA, 42 bp, Artificial Sequence
  Oligonucleotides
acdcttcagctgcttctccaatcctgctatgatcagttcaag

SEQ ID NO: 1102 - DNA, 42 bp, Artificial Sequence
  Oligonucleotides
ggccttcagctgcttctccaatccgcdtatgatcagttcaag

SEQ ID NO: 1103 - DNA, 42 bp, Artificial Sequence
  Oligonucleotides
acdcttcagctgcttctccaatccgcdtatgatcagttcaag

SEQ ID NO: 1104 - DNA, 42 bp, Artificial Sequence; identical to SEQ ID NO: 968
  Oligonucleotides

SEQ ID NO: 1105 - DNA, 30 bp, Artificial Sequence
  Oligonucleotides
cacgtcaagaacaagcgagctctgctagac

SEQ ID NO: 1106 - DNA, 37 bp, Artificial Sequence
  Oligonucleotides
ggaacttcggcgcgccaaggtaccttctgcagctatc

SEQ ID NO: 1107 - DNA, 42 bp, Artificial Sequence; identical to SEQ ID NO: 890
  Oligonucleotides

SEQ ID NO: 1108 - DNA, 42 bp, Artificial Sequence
  Oligonucleotides
atcgagatgctcgatcsccacgctatacactwtttacyattg

SEQ ID NO: 1109 - DNA, 42 bp, Artificial Sequence
  Oligonucleotides
ttcgagatgctcgatcsccacgctatacactwtttacyattg

SEQ ID NO: 1110 - DNA, 42 bp, Artificial Sequence
  Oligonucleotides
atcgagatgctcgatcsccacgctmcccactwtttacyattg

SEQ ID NO: 1111 - DNA, 42 bp, Artificial Sequence
  Oligonucleotides
ttcgagatgctcgatcsccacgctmcccactwtttacyattg

SEQ ID NO: 1112 - DNA, 42 bp, Artificial Sequence
  Oligonucleotides
gaaggggmaagctggcaaaatttcttgaggaacaamgctaag

SEQ ID NO: 1113 - DNA, 42 bp, Artificial Sequence; identical to SEQ ID NO: 908
  Oligonucleotides

SEQ ID NO: 1114 - DNA, 42 bp, Artificial Sequence
  Oligonucleotides
gtctgtctaggtacgggcttcacggagcaacaatatgaaact

SEQ ID NO: 1115 - DNA, 42 bp, Artificial Sequence
  Oligonucleotides
gcggagaaccgccttgccttcctgacacaacaaggtttctcc

SEQ ID NO: 1116 - DNA, 42 bp, Artificial Sequence
  Oligonucleotides
cttgagaacgccctctacgcatggcaagcagtggggatctac

SEQ ID NO: 1117 - DNA, 42 bp, Artificial Sequence
  Oligonucleotides
cttgagcaggccctctacgcatggcaagcagtggggatctac

SEQ ID NO: 1118 - DNA, 42 bp, Artificial Sequence
  Oligonucleotides
actctgggttgtgtcttgctggatcaagagctgcaagtcgct

SEQ ID NO: 1119 - DNA, 42 bp, Artificial Sequence; identical to SEQ ID NO: 1017
  Oligonucleotides

SEQ ID NO: 1120 - DNA, 42 bp, Artificial Sequence
  Oligonucleotides
ctggttcgacaagctktagaactcaaggatcaccaaggtgca

SEQ ID NO: 1121 - DNA, 42 bp, Artificial Sequence
  Oligonucleotides
ctggttcgacaagcttgggaactcaaggatcaccaaggtgca

SEQ ID NO: 1122 - DNA, 42 bp, Artificial Sequence
  Oligonucleotides
gagccagccttcctgttcggccttgaactgatcatatcagga

SEQ ID NO: 1123 - DNA, 42 bp, Artificial Sequence
  Oligonucleotides
ttggagaagcagctgaaggcagaaagtgggtcttaatgatag

SEQ ID NO: 1124 - DNA, 42 bp, Artificial Sequence; identical to SEQ ID NO: 931
  Oligonucleotides

SEQ ID NO: 1125 - DNA, 42 bp, Artificial Sequence
  Oligonucleotides
attttgccagcttkccccttccaatrgtaaawagtgtatagc

SEQ ID NO: 1126 - DNA, 42 bp, Artificial Sequence
  Oligonucleotides
attttgccagcttkccccttccaatrgtaaawagtgggkagc

SEQ ID NO: 1127 - DNA, 42 bp, Artificial Sequence; identical to SEQ ID NO: 940
  Oligonucleotides

SEQ ID NO: 1128 - DNA, 42 bp, Artificial Sequence; identical to SEQ ID NO: 1092
  Oligonucleotides

SEQ ID NO: 1129 - DNA, 42 bp, Artificial Sequence
  Oligonucleotides
gaaggcaaggcggttctccgcagtttcatattgttgctccgt

SEQ ID NO: 1130 - DNA, 42 bp, Artificial Sequence; identical to SEQ ID NO: 1094
  Oligonucleotides

SEQ ID NO: 1131 - DNA, 42 bp, Artificial Sequence
  Oligonucleotides
tgcgtagagggcctgctcaagggagaaaccttgttgtgtcag

SEQ ID NO: 1132 - DNA, 42 bp, Artificial Sequence
  Oligonucleotides
cagcaagacacaacccagagtgtagatccccactgcttgcca

SEQ ID NO: 1133 - DNA, 42 bp, Artificial Sequence; identical to SEQ ID NO: 956
  Oligonucleotides

SEQ ID NO: 1134 - DNA, 42 bp, Artificial Sequence
  Oligonucleotides
ttctamagcttgtcgaaccagtggcggcatactatcagtagt

SEQ ID NO: 1135 - DNA, 42 bp, Artificial Sequence; identical to SEQ ID NO: 1060
  Oligonucleotides

SEQ ID NO: 1136 - DNA, 42 bp, Artificial Sequence; identical to SEQ ID NO: 1099
  Oligonucleotides

SEQ ID NO: 1137 - DNA, 42 bp, Artificial Sequence
  Oligonucleotides
tgccttcagctgcttctccaatcctgatatgatcagttcaag

SEQ ID NO: 1138 - DNA, 42 bp, Artificial Sequence; identical to SEQ ID NO: 968
  Oligonucleotides

SEQ ID NO: 1139 - DNA, 42 bp, Artificial Sequence; identical to SEQ ID NO: 890
  Oligonucleotides

SEQ ID NO: 1140 - DNA, 42 bp, Artificial Sequence
  Oligonucleotides
atagagatgctcgatcsgcaccaaaytcactacttacccttg

SEQ ID NO: 1141 - DNA, 42 bp, Artificial Sequence
  Oligonucleotides
atagagatgctcgatcsgcacavgaytcactacttacccttg

SEQ ID NO: 1142 - DNA, 42 bp, Artificial Sequence
  Oligonucleotides
gaaggggaaagctggcaaratttcttgaggaacwgggctaag

SEQ ID NO: 1143 - DNA, 42 bp, Artificial Sequence
  Oligonucleotides
gaaggggaaagctggcaaratttcttgaggaacaakgctaag

SEQ ID NO: 1144 - DNA, 42 bp, Artificial Sequence; identical to SEQ ID NO: 979
  Oligonucleotides

SEQ ID NO: 1145 - DNA, 42 bp, Artificial Sequence
  Oligonucleotides
gtcgcactaggtacgggcttcacggagmracaatatgaaact

SEQ ID NO: 1146 - DNA, 42 bp, Artificial Sequence
  Oligonucleotides
gtctgtctaggtacgggcttcacggagmracaatatgaaact

SEQ ID NO: 1147 - DNA, 42 bp, Artificial Sequence
  Oligonucleotides
atggagaactsgcttgccttcctgacacaacaaggtttctcc

SEQ ID NO: 1148 - DNA, 42 bp, Artificial Sequence
  Oligonucleotides
atggagaacaascttgccttcctgacacaacaaggtttctcc

SEQ ID NO: 1149 - DNA, 42 bp, Artificial Sequence
  Oligonucleotides
caagagaactsgcttgccttcctgacacaacaaggtttctcc

SEQ ID NO: 1150 - DNA, 42 bp, Artificial Sequence
  Oligonucleotides
caagagaacaascttgccttcctgacacaacaaggtttctcc

SEQ ID NO: 1151 - DNA, 42 bp, Artificial Sequence
  Oligonucleotides
gctgagaactsgcttgccttcctgacacaacaaggtttctcc

SEQ ID NO: 1152 - DNA, 42 bp, Artificial Sequence
  Oligonucleotides
tctgagaactsgcttgccttcctgacacaacaaggtttctcc

SEQ ID NO: 1153 - DNA, 42 bp, Artificial Sequence
  Oligonucleotides
gctgagaacaascttgccttcctgacacaacaaggtttctcc

SEQ ID NO: 1154 - DNA, 42 bp, Artificial Sequence
  Oligonucleotides
tctgagaacaascttgccttcctgacacaacaaggtttctcc

SEQ ID NO: 1155 - DNA, 42 bp, Artificial Sequence
  Oligonucleotides
cttgagaacgccctctacgcattccaagcagtggggatctac

SEQ ID NO: 1156 - DNA, 42 bp, Artificial Sequence
  Oligonucleotides
cttgagaacgccctctacgcaakgcaagcagtggggatctac

SEQ ID NO: 1157 - DNA, 42 bp, Artificial Sequence
  Oligonucleotides
cttgagaacgccctctacgcaaatcaagcagtggggatctac

SEQ ID NO: 1158 - DNA, 42 bp, Artificial Sequence; identical to SEQ ID NO: 1118
  Oligonucleotides

SEQ ID NO: 1159 - DNA, 42 bp, Artificial Sequence; identical to SEQ ID NO: 1017
  Oligonucleotides

SEQ ID NO: 1160 - DNA, 42 bp, Artificial Sequence
  Oligonucleotides
ctggttcgacaagcttacgaactcgcggatcaccaaggtgca

SEQ ID NO: 1161 - DNA, 42 bp, Artificial Sequence
  Oligonucleotides
ctggttcgacaagcttacgaactctycgatcaccaaggtgca

SEQ ID NO: 1162 - DNA, 42 bp, Artificial Sequence
  Oligonucleotides
ctggttcgacaagcttacgaactcaatgatcaccaaggtgca

SEQ ID NO: 1163 - DNA, 42 bp, Artificial Sequence
  Oligonucleotides
ctggttcgacaagctdttgaactcgcggatcaccaaggtgca

SEQ ID NO: 1164 - DNA, 42 bp, Artificial Sequence
  Oligonucleotides
ctggttcgacaagctdttgaactctycgatcaccaaggtgca

SEQ ID NO: 1165 - DNA, 42 bp, Artificial Sequence
  Oligonucleotides
ctggttcgacaagctdttgaactcaatgatcaccaaggtgca

SEQ ID NO: 1166 - DNA, 42 bp, Artificial Sequence; identical to SEQ ID NO: 1122
  Oligonucleotides

SEQ ID NO: 1167 - DNA, 42 bp, Artificial Sequence; identical to SEQ ID NO: 1085
  Oligonucleotides

SEQ ID NO: 1168 - DNA, 42 bp, Artificial Sequence
  Oligonucleotides
gtgcsgatcgagcatctctatggccatagcgtctagcagagc

SEQ ID NO: 1169 - DNA, 42 bp, Artificial Sequence
  Oligonucleotides
atyttgccagctttccccttccaagggtaagtagtgartttg

SEQ ID NO: 1170 - DNA, 42 bp, Artificial Sequence
  Oligonucleotides
atyttgccagctttccccttccaagggtaagtagtgartcbt

SEQ ID NO: 1171 - DNA, 42 bp, Artificial Sequence
  Oligonucleotides
gagcaaagcatttctcatggacttagcccwgttcctcaagaa

SEQ ID NO: 1172 - DNA, 42 bp, Artificial Sequence
  Oligonucleotides
gagcaaagcatttctcatggacttagcmttgttcctcaagaa

SEQ ID NO: 1173 - DNA, 42 bp, Artificial Sequence
  Oligonucleotides
gaagcccgtacctagtgcgaccttggctccatcacggtgact

SEQ ID NO: 1174 - DNA, 42 bp, Artificial Sequence; identical to SEQ ID NO: 1092
  Oligonucleotides

SEQ ID NO: 1175 - DNA, 42 bp, Artificial Sequence
  Oligonucleotides
gaaggcaagcsagttctccatagtttcatattgtykctccgt

SEQ ID NO: 1176 - DNA, 42 bp, Artificial Sequence
  Oligonucleotides
gaaggcaagsttgttctccatagtttcatattgtykctccgt

SEQ ID NO: 1177 - DNA, 42 bp, Artificial Sequence
  Oligonucleotides
gaaggcaagcsagttctcttgagtttcatattgtykctccgt

SEQ ID NO: 1178 - DNA, 42 bp, Artificial Sequence
  Oligonucleotides
gaaggcaagsttgttctcttgagtttcatattgtykctccgt

SEQ ID NO: 1179 - DNA, 42 bp, Artificial Sequence
  Oligonucleotides
gaaggcaagcsagttctcagmagtttcatattgtykctccgt

SEQ ID NO: 1180 - DNA, 42 bp, Artificial Sequence
  Oligonucleotides
gaaggcaagsttgttctcagmagtttcatattgtykctccgt

SEQ ID NO: 1181 - DNA, 42 bp, Artificial Sequence; identical to SEQ ID NO: 1094
  Oligonucleotides

SEQ ID NO: 1182 - DNA, 42 bp, Artificial Sequence
  Oligonucleotides
cagcaagacacaacccagagtgtagatccccactgcttggaa

SEQ ID NO: 1183 - DNA, 42 bp, Artificial Sequence
  Oligonucleotides
cagcaagacacaacccagagtgtagatccccactgcttgcmt

SEQ ID NO: 1184 - DNA, 42 bp, Artificial Sequence
  Oligonucleotides
cagcaagacacaacccagagtgtagatccccactgcttgatt

SEQ ID NO: 1185 - DNA, 42 bp, Artificial Sequence; identical to SEQ ID NO: 956
  Oligonucleotides

SEQ ID NO: 1186 - DNA, 42 bp, Artificial Sequence
  Oligonucleotides
ttcgtaagcttgtcgaaccagtggcggcatactatcagtagt

SEQ ID NO: 1187 - DNA, 42 bp, Artificial Sequence
  Oligonucleotides
ttcaahagcttgtcgaaccagtggcggcatactatcagtagt

SEQ ID NO: 1188 - DNA, 42 bp, Artificial Sequence
  Oligonucleotides
gccgaacaggaaggctggctctgcaccttggtgatccgcgag

SEQ ID NO: 1189 - DNA, 42 bp, Artificial Sequence
  Oligonucleotides
gccgaacaggaaggctggctctgcaccttggtgatcgragag

SEQ ID NO: 1190 - DNA, 42 bp, Artificial Sequence
  Oligonucleotides
gccgaacaggaaggctggctctgcaccttggtgatcattgag

SEQ ID NO: 1191 - DNA, 42 bp, Artificial Sequence
  Oligonucleotides
ggccttcagctgcttctccaatcctgatatgatcagttcaag

SEQ ID NO: 1192 - DNA, 42 bp, Artificial Sequence; identical to SEQ ID NO: 968
  Oligonucleotides

SEQ ID NO: 1193 - DNA, 621 bp, Artificial Sequence
  Nucleotides encoding Sulfonylurea responsive repressor
atggccagactcgacaagagcaaggtgatcaacagcgcactggagctgctgaacgaggtcggaatcgaaggcctcacaacccgtaagctcgcccagaagctcggggttgagcagcctacattgtactggcacgtcaagaacaagcgagctctgctagacgctatggccattgagatgctcgataggcacgctacccactactgtcctttggaaggggaaagctggcaagacttcttgaggaacaaagctaagtccatgagaaatgctttgctcagtcaccgtgatggagccaaggtctgtctaggtacgggcttcacggagcaacagtatgaaactgctgagaacagccttgccttcctgtgtcaacaaggtttctcccttgagaacgccctctacgcaatgcaagctgttgggatctacactctgggttgtgtcttgctggatcaagagctgcaagtcgctaaggaggagagggaaacacctactactgatagtatgccgccactggttcgacaagctctggaactcaaagatcaccaaggtgcagagccagccttcctgttcggccttgaactgatcatagcaggattggagaagcagctgaaggccgaaagtgggtct

SEQ ID NO: 1194 - DNA, 621 bp, Artificial Sequence
  Nucleotides encoding Sulfonylurea responsive repressor
atggccagactcgacaagagcaaggtgatcaacagcgcactggagctgctgaacgaggtcggaatcgaaggcctcacaacccgtaagctcgcccagaagctcggggttgagcagcctacattgtactggcacgtcaagaacaagcgagctctgctagacgctatggccattgagatgctcgatcgccacgctacccactactgtcctttggaaggggaaagctggcaagacttcttgaggaacaaagctaagtccatgagatgtgctttgctcagtcaccgtgatggagccaaggtctgtctaggtacgggcttcacggagcaacagtatgaaactgctgagaacagccttgccttcctgtgtcaacaaggtttctcccttgagaacgccctctacgcaatgcaagctgttgggatctacactctgggttgtgtcttgctggatcaagagctgcaagtcgctaaggaggagagggaaacacctactactgatagtatgccgccactggttcgacaagctctggaactcaaggatcaccaaggtgcagagccagccttcctgttcggccttgaactgatcataagcggattggagaagcagctgaaggccgaaagtgggtct

SEQ ID NO: 1195 - DNA, 621 bp, Artificial Sequence
  Nucleotides encoding Sulfonylurea responsive repressor
atggccagactcgacaagagcaaggtgatcaacagcgcactggagctgctgaacgaggtcggaatcgaaggcctcacaacccgtaagctcgcccagaagctcggggttgagcagcctacattgtactggcacgtcaagaacaagcgagctctgctagacgctatggccattgagatgctcgataggcacgctacccactacctacctttggaaggggcaagctggcaagacttcttgaggaacaaagctaagtccatgagaaatgctttgctcagtcaccgtgatggagccaaggtctgtctaggtacgggcttcacggagcaacagtatgaaactgctgagaacagccttgccttcctgtgtcaacaaggtttctcccttgagaacgccctctacgcaatgcaagctgttgggatctacactctgggttgtgtcttgctggatcaagagctgcaagtcgctaaggaggagagggaaacacctactactgatagtatgccgccactggttcgacaagctctggaactcaaggatcaccaaggtgcagagccagccttcctgttcggccttgaactgatcatagcaggattggagaagcagctgaagagtgaaagtgggtct

SEQ ID NO: 1196 - DNA, 621 bp, Artificial Sequence
  Nucleotides encoding Sulfonylurea responsive repressor
atggccagactcgacaagagcaaggtgatcaacagcgcactggagctgctgaacgaggtcggaatcgaaggcctcacaacccgtaagctcgcccagaagctcggggttgagcagcctacattgtactggcacgtcaagaacaagcgagctctgctagacgctatggccattgagatgctcgatccccacgctatacacttgttacccttggaaggggcaagctggcaagacttcttgaggaacaacgctaagtccatgagacgcgctttgctcagtcaccgtgatggagccaaggtctgtctaggtacgggcttcacggagcaacagtatgaaactgctgagaacagccttgccttcctgtgtcaacaaggtttctcccttgagaacgccctctacgcaatgcaagctgttgggatctacactctgggttgtgtcttgctggatcaagagctgcaagtcgctaaggaggagagggaaacacctactactgatagtatgccgccactggttcgacaagctctggaactcaaggatcaccaaggtgcagagccagccttcctgttcggccttgaactgatcatatgcggattggagaagcagctgaaggccgaaagtgggtct

SEQ ID NO: 1197 - DNA, 621 bp, Artificial Sequence
  Nucleotides encoding Sulfonylurea responsive repressor
atggccagactcgacaagagcaaggtgatcaacagcgcactggagctgctgaacgaggtcggaatcgaaggcctcacaacccgtaagctcgcccagaagctcggggttgagcagcctacattgtactggcacgtcaagaacaagcgagctctgctagacgctatggccattgagatgctcgataggcacgctacccactacctacctttggaaggggaaagctggcaagacttcttgaggaacaaagctaagtccatgagatgtgctttgcttagtcaccgtgatggagccaaggtctgtctaggtacgggcttcacggagcaacagtatgaaactgctgagaacagccttgccttcctgacacaacaaggtttctcccttgagaacgccctctacgcaatgcaagctgttgggatctacactctgggttgtgtcttgctggatcaagagctgcaagtcgctaaggaggagagggaaacacctactactgatagtatgccgccactggttcgacaagctctggaactcaaggatcaccaaggtgcagagctcgccttcctgttcggccttgaactgatcatacgcggattggagaagcagctgaagtgtgaaagtgggtct

SEQ ID NO: 1198 - DNA, 621 bp, Artificial Sequence
  Nucleotides encoding Sulfonylurea responsive repressor
atggccagactcgacaagagcaaggtgatcaacagcgcactggagctgctgaacgaggtcggaatcgaaggcctcacaacccgtaagctcgcccagaagctcggggttgagcagcctacattgtactggcacgtcaagaacaagcgagctctgctagacgctatggccattgagatgctcgatccccacgctacccacttctgtctcttggaaggggaaagctggcaagacttcttgaggaacaacgctaagtccatgagaaatgctttgctcagtcaccgtgatggagccaaggtctgtctaggtacgggcttcacggagcaacagtatgaaactgctgagaacagccttgccttcctgtgtcaacaaggtttctcccttgagaacgccctctacgcaatgcaagctgttgggatctacactctgggttgtgtcttgctggatcaagagctgcaagtcgctaaggaggagagggaaacacctactactgatagtatgccgccactggttcgacaagctctggaactcaaggatcaccaaggtgcagagccagccttcctgttcggccttgaactgatcataagcggattggagaagcagctgaagtgtgaaagtgggtct

SEQ ID NO: 1199 - DNA, 621 bp, Artificial Sequence
  Nucleotides encoding Sulfonylurea responsive repressor
atggccagactcgacaagagcaaggtgatcaacagcgcactggagctgctgaacgaggtcggaatcgaaggcctcacaacccgtaagctcgcccagaagctcggggttgagcagcctacattgtactggcacgtcaagaacaagcgagctctgctagacgctatggccattgagatgctcgataggcacgctacccactactctcctttggaaggggaaagctggcaagacttcttgaggaacaaagctaagtccatgagatgcgctttgctcagtcaccgtgatggagccaaggtctgtctaggtacgggcttcacggagcaacagtatgaaactgctgagaacagccttgccttcctgacacaacaaggtttctcccttgagaacgccctctacgcaatgcaagctgttgggatctacactctgggttgtgtcttgctggatcaagagctgcaagtcgctaaggaggagagggaaacacctactactgatagtatgccgccactggttcgacaagctctggaactcaaggatcaccaaggtgcagagcccgccttcctgttcggccttgaactgatcatagcaggattggagaagcagctgaaggccgaaagtgggtct

SEQ ID NO: 1200 - DNA, 621 bp, Artificial Sequence
  Nucleotides encoding Sulfonylurea responsive repressor
atggccagactcgacaagagcaaggtgatcaacagcgcactggagctgctgaacgaggtcggaatcgaaggcctcacaacccgtaagctcgcccagaagctcggggttgagcagcctacattgtactggcacgtcaagaacaagcgagctctgctagacgctatggccatcgagatgctcgatccccacgctccccacttgttacccttggaaggggcaagctggcaagacttcttgaggaacaacgctaagtccatgagatgcgctttgctcagtcaccgtgatggagccaaggtctgtctaggtacgggcttcacggagcaacagtatgaaactgctgagaacagccttgccttcctgacacaacaaggtttctcccttgagaacgccctctacgcaatgcaagctgttgggatctacactctgggttgcgcgttgctggatcaagagctgcaagtcgctaaggaggagagggaaacacctactactgatagtatgccgccactggttcgacaagctctggaactcaaggatcaccaaggtgcagagccagccttcctgttcggccttgaactgatcataagcggattggagaagcagctgaagcgtgaaagtgggtct

SEQ ID NO: 1201 - DNA, 621 bp, Artificial Sequence; identical to SEQ ID NO: 824
  Nucleotides encoding Sulfonylurea responsive repressor

SEQ ID NO: 1202 - DNA, 621 bp, Artificial Sequence
  Nucleotides encoding Sulfonylurea responsive repressor
atggccagactcgacaagagcaaggtgatcaacagcgcactggagctgctgaacgaggtcggaatcgaaggcctcacaacccgtaagctcgcccagaagctcggggttgagcagcctacattgtactggcacgtcaagaacaagcgagctctgctagacgctatggccattgagatgctcgataggcacgctacccactacctacctttggaaggggcaagctggcaagacttcttgaggaacaaagctaagtccatgagacgtgctttgctcagtcaccgtgatggagccaaggtctgtctaggtacgggcttcacggagcaacagtatgaaactgctgagaacagccttgccttcctgacgcaacaaggtttctcccttgagaacgccctctacgcaatgcaagctgttgggatctacactctgggttgtgtcttgctgaatcaagagctgcaagtcgctaaggaggagagggaaacacctactactgatagtatgccgccactggttcgacaagctctggaactcaaggatcaccaaggtgcagagccagccttcctgttcggccttgaactgatcatagcaggattggagaagcagctgaaggccgaaagtgggtct

SEQ ID NO: 1203 - DNA, 621 bp, Artificial Sequence
  Nucleotides encoding Sulfonylurea responsive repressor
atggccagactcgacaagagcaaggtgatcaacagcgcactggagctgctgaacgaggtcggaatcgaaggcctcacaacccgtaagctcgcccagaagctcggggttgagcagcctacattgtactggcacgtcaagaacaagcgagctctgctagacgctatggccattgagatgctcgataggcacgctacccactactgtcctttggaaggggaaagctggcaagacttcttgaggaacaaagctaagtccatgagaaatgctttgctcagtcaccgtgatggagccaaggtgtgtctaggtacgggcttcacggagcaacagtatgaaactgctgagaacagccttgccttcctgacacaacaaggtttctcccttgagaacgccctctacgcaatgcaagctgttgggatctacactctgggttgtgtcttgctggatcaagagctgcaagtcgctaaggaggagagggaaacacctactactgatagtatgccgccactggttcgacaagctctggaactcaaggatcaccaaggtgcagagccagccttcctgttcggccttgaactgatcatagcaggattggagaagcagctgaaggctgaaagtgggtct

SEQ ID NO: 1204 - DNA, 621 bp, Artificial Sequence; identical to SEQ ID NO: 821
  Nucleotides encoding Sulfonylurea responsive repressor

SEQ ID NO: 1205 - DNA, 621 bp, Artificial Sequence
  Nucleotides encoding Sulfonylurea responsive repressor
atggccagactcgacaagagcaaggtgatcaacagcgcactggagctgctgaacgaggtcggaatcgaaggcctcacaacccgtaagctcgcccagaagctcggggttgagcagcctacattgtactggcacgtcaagaacaagcgagctctgctagacgctatggccattgagatgctcgatccccacgctacccactactctcctttggaaggggaaagctggcaagacttcttgaggaacaaagctaagtccatgagatgcgctttgctcagtcaccgtgatggagccaaggtctgtctaggtacgggcttcacggagcaacagtatgaaactgctgagaacagccttgccttcctgtgtcaacaaggtttctcccttgagaacgccctctacgcaatgcaagctgttgggatctacactctgggttcggcgttgctggatcaagagctgcaagtcgctaaggaggagagggaaacacctactactgatagtatgccgccactggtacgacaagctctgaacctcaaggatcaccaaggtgcagagccagccttcctgttcggccttgaactgatcatacgcggattggagaagcagctgaagtgtgaaagtgggtct

SEQ ID NO: 1206 - DNA, 621 bp, Artificial Sequence
  Nucleotides encoding Sulfonylurea responsive repressor
atggccagactcgacaagagcaaggtgatcaacagcgcactggagctgctgaacgaggtcggaatcgaaggcctcacaacccgtaagctcgcccagaagctcggggttgagcagcctacattgtactggcacgtcaagaacaagcgagctctgctagacgctatggccattgagatgctcgataggcacgctacccactactctcctttggaacgggaaagctggcaaaatttcttgaggaacaacgctaagtccatgagaaatgctttgctcagtcaccgtgatggagccaaggtctgtctaggtacgggcttcacggagcaacagtatgaaactgctgagaactcacttgccttcctgacacaacaaggtttctcccttgagaacgccctctacgcaatgcaagctgttgggatctacactctgggttgtgtgttgctggatcaagagctgcaagtcgctaaggaggagagggaaacacctactactgatagtatgccgccactggttcgacaagctgtggaactcaaggatcaccaaggtgcagagccagccttcctgttcggccttgaactgatcatagcaggattggagaagcagctgaagtgtgaaagtgggtct

SEQ ID NO: 1207 - DNA, 621 bp, Artificial Sequence
  Nucleotides encoding Sulfonylurea responsive repressor
atggccagactcgacaagagcaaggtgatcaacagcgcactggagctgctgaacgaggtcggaatcgaaggcctcacaacccgtaagctcgcccagaagctcggggttgagcagcctacattgtactggcacgtcaagaacaagcgagctctgctagacgctatggccattgagatgctcaacaggcacgctacccagtactgtcctttggagggggaaagctggcaaaatttcttgaggaacaacgctaagtccatgagatgcgctttgctcagtcaccgtgatggagccaaggtctgtctaggtacgggcttcacggagcaacagtatgaaactgctgagaacagccttgccttcctgacacaacaaggtttctcccttgagaacgccctctacgcaatgcaagctgttgggatctacactctgggttgtgtcttgctggatcaagagctgcaagtcgctaaggaggagagggaaacacctactactgatagtatgccgccactggttcgacaagctgtggaactcaaggatcaccaaggtgcagagccagccttcctgttcggccttgaactgatcataagcggattggagaagcagctgaagcgtgaaagtgggtct

SEQ ID NO: 1208 - DNA, 624 bp, Artificial Sequence
  Nucleotides encoding Sulfonylurea responsive repressor
atgggatctagattagataaaagtaaagtgattaacagcgcattagagctgcttaatgaggtcggaatcgaaggtttaacaacccgtaaactcgcccagaagctaggtgtagagcagcctacattgtattggcatgtaaaaaataagcgagctctgctagacgctatggccttcgagatgctcgatcgccacgctatacactatttaccattggaaggggaaagctggcaaaatttcttgaggaacaacgctaagtccatgagaaacgctttgctcagtcaccgtgatggagccaaggtctgtctaggtacgggcttcacggagcaacaatatgaaactgcggagaaccgccttgccttcctgacacaacatggtttctcccttgagcaggccctctacgcatggcaagcagtggggatctacactctgggttgtgtcttgctggatcaacagctgcaagtcgctaaggaggagagggaaacacctactactgatagtatgccgccactggttcgacaagcttgggaactcaaggatcaccaaggtgcagagccagccttcctgttcggccttgaactgatcatatcaggattggagaagcagctgaaggcagaaagtgggtct

SEQ ID NO: 1209 - DNA, 624 bp, Artificial Sequence
  Nucleotides encoding Sulfonylurea responsive repressor
atgggatctagattagataaaagtaaagtgattaacagcgcattagagctgcttaatgaggtcggaatcgaaggtttaacaacccgtaaactcgcccagaagctaggtgtagagcagcctacattgtattggcatgtaaaaaataagcgagctctgctagacgctatggccttcgagatgctcgatcgccacgctatacactatttaccattggaaggggaaagctggcaaaatttcttgaggaacaacgctaagtccatgagaaacgctttgctcagtcaccgtgatggagccaaggtctctctaggtacgggcttcacggagcaacaatatgaaactgcggagaaacgccttgccttcctgacacaacaaggtttctcccttgagaacgccctctacgcatggcaagcagtggggatctacactctgggttgtgtcttgctggatcaagagctgcaagtcgctaaggaggagagggaaacacctactactgatagtatgccgccactggttcgacaagcttgggaactcaaggatcaccaaggtgcagagccagccttcctgttcggccttgaactgatcatatcaggattggagaagcagctgaaggcagaaagtgggtct

SEQ ID NO: 1210 - DNA, 624 bp, Artificial Sequence
  Nucleotides encoding Sulfonylurea responsive repressor
atgggatctagattagataaaagtaaagtgattaacagcgcattagagctgcttaatgaggtcggaatcgaaggtttaacaacccgtaaactcgcccagaagctaggtgtagagcagcctacattgtattggcatgtaaaaaataagcgagctctgctagacgctatggccatcgagatgctcgatcgccacgctatacactatttaccattggaaggggcaagctggcaaaatttcttgaggaacaacgctaagtccatgagaaacgctttgctcagtcaccgtgatggagccaaggtctgtctaggtacgggcttcacggagcaacaatatgaaactgcggagaactgccttgccttcctgacacaacaaggtttctcccttgagaacgccctctacgcatggcaagcagtggggatctacactctgggttgtgtcttgctggatcaagagctgcaagtcgctaaggaagagagggaaacacctactactgatagtatgccgccactggttcgacaagcttgggcactcaaggatcaccaaggtgcagagccagccttcctgttcggccttgaactgatcatatcaggattggagaagcagctgaaggcagaaagtgggtct

SEQ ID NO: 1211 - DNA, 624 bp, Artificial Sequence
  Nucleotides encoding Sulfonylurea responsive repressor
atgggatctagattagataaaagtaaagtgattaacagcgcattagagctgcttaatgaggtcggaatcgaaggtttaacaacccgtaaactcgcccagaagctaggtgtagagcagcctacattgtattggcatgtaaaaaataagcgagctctgctagacgctatggccttcgagatgctcgatcgccacgctatacactttttaccattggaaggggcaagctggcaaaatttcttgaggaacaccgctaagtccatgagaaacgctttgctcagtcaccgtgatggagccaaggtctgtctaggtacgggcttcacggagcgacaatatgaaactgcggagaaccgccttgccttcctgacacaacaaggtttctcccttgagcaggccctctacgcatggcaagcagtggggatctacactctgggttgtgtcttgctggatcaagagctgcaagtcgctaaggaggagagggaaacacctactactgatagtatgccgccactggttcgacaagcttgggaactcaaggatcaccaaggtgcagagccagccttcctgttcggccttgaactgatcatatcaggattggagaagcagctgaaggcagaaagtgggtct

SEQ ID NO: 1212 - DNA, 624 bp, Artificial Sequence
  Nucleotides encoding Sulfonylurea responsive repressor
atgggatctagattagataaaagtaaagtgattaacagcgcattagagctgcttaatgaggtcggaatcgaaggtttaacaacccgtaaactcgcccagaagctaggtgtagagcagcctacattgtattggcatgtaaaaaataagcgagctctgctagacgctatggccttcgagatgctcgatccccacgctatacactatttaccattggaaggggaaagctggcaaaatttcttgaggaaccatgctaagtccatgagaaacgctttgctcagtcaccgtgatggagccaaggtctgtctaggtacgggcttcacggagcaacaatatgaaactgcggagaaccgccttgccttcctgacacaacaaggtttctcccttgagaacgccctctacgcatggcaagcagtggggatctacactctgggttgtgtcttgctggatcaagagctgcaagtcgctaaggaggagagggaaacacctactactgatagtatgccgccactggttcgacaagcttgggaactcaaggatcaccaaggtgcagagccagccttcctgttcggccttgaactgatcatatcaggattggagaagcagctgaaggcagaaagtgggtct

SEQ ID NO: 1213 - DNA, 624 bp, Artificial Sequence
  Nucleotides encoding Sulfonylurea responsive repressor
atgggatctagattagataaaagtaaagtgattaacagcgcattagagctgcttaatgaggtcggaatcgaaggtttaacaacccgtaaactcgcccagaagctaggtgtagagcagcctacattgtattggcatgtaaaaaataagcgagctctgctagacgctatggccatcgagatgctcgatcgccacgctatacactatttaccattggaaggggcaagctggcaaaatttcttgaggaacaacgctaagtccatgagaaacgctttgctcagtcaccgtgatggagccaaggtctgtctaggtacgggcttcacggagcaacaatatgaaactgcggagaaccgccttgccttcctgacacaacaaggtttctcccttgagcaggccctctacgcatggcaagcagtggggatctacactctgggttgtgtcttgctggatcaagagctgcaagtcgctaaggaggagagggaaacacctactaatgatagtatgccgccactggttcgacaagcttgggaactcaaggatcaccaaggtgcagagccagccttcctgttcggccttgaactgatcatatcaggattggagaagcagctgaaggcagaaagtgggtct

SEQ ID NO: 1214 - DNA, 624 bp, Artificial Sequence
  Nucleotides encoding Sulfonylurea responsive repressor
atgggatctagattagataaaagtaaagtgattaacagcgcattagagctgcttaatgaggtcggaatcgaaggtttaacaacccgtaaactcgcccagaagctaggtgtagagcagcctacattgtattggcatgtaaaaaataagcgagctctgctagacgctatggccttcgagatgctcgatcgccacgctccccactttttactattggaaggggcaagctggcaaaatttcttgaggaacaaagctaagtccatgagaaacgctttgctcagtcaccgtgatggagccaaggtctgtctaggtacgggcttcacggagaaacaatatgaaactgcggagaacagccttgccttcctgacacaacaaggtttctcccttgagaacgccctctacgcatggcaagcagtggggatctacactctggggtgtgtcttgctggatcaagagctgcaagtcgctaaggaggagagggaaacacctactactgatagtatgccgccactggttcgacaagcttgggaactcaaggatcaccaaggtgcagagccagccttcctgttcggccttgaactgatcatatcaggattggagaagcagctgaaggcagaaagtgggtct

SEQ ID NO: 1215 - DNA, 624 bp, Artificial Sequence
  Nucleotides encoding Sulfonylurea responsive repressor
atgggatctagattagataaaagtaaagtgattaacagcgcattagagctgcttaatgaggtcggaatcgaaggtttaacaacccgtaaactcgcccagaagctaggtgtagagcagcctacattgtattggcatgtaaaaaataagcgagctctgctagacgctatggccttcgagatgctcaatcgccacgctatacactatttaccattggaaggggaaagctggcaaaatttcttgaggaacaacgctaagtccatgagaaacgctttgctcagtcaccgtgatggagccaaggtctgtctaggtacgggcttcacggagcaacaatatgaaactgcggagaaccgccttgccttcctgacacaacaaggtttctcccttgagcaggccctctacgcatggcaagcagtggggatctacactctgggttgtgccttgctggatcaagagctgcaagtcgctaaggaggagagggaaacacctactactgatagtatgccgccactggttcgacaagcttgggaactcaaggatcaccaaggtgcagagccagccttcctgttcggccttgaactgatcatatcaggattggagaagcagctgaaggcagaaagtgggtct

SEQ ID NO: 1216 - DNA, 624 bp, Artificial Sequence
  Nucleotides encoding Sulfonylurea responsive repressor
atgggatctagattagataaaagtaaagtgattaacagcgcattagagctgcttaatgaggtcggaatcgaaggtttaacaacccgtaaactcgcccagaagctaggtgtagagcagcctacattgtattggcatgtaaaaaataagcgagctctgctagacgctatggccatcgagatgctcgatcgccacgctatacactttttatcattggaaggggaaagctggcaaaatttcttgaggaacaaagctatgtccatgagaaacgctttgctcagtaaccgtgatggagccaaggtctgtctaggtacgggcttcacggagcaacaatatgaaactgcggagaacagccttgccttcctgacacaacaaggtttctcccttgagaacgccctctacgcatggcaagcagtggggatctacactctgggttgtgtcttgctggatcaagagctgcacgtcgctaaggaggagagggaaacacctactactgatagtatgccgccactggttcgacaagcttgggaactcaaggatcaccaaggtgcagagccagccttcctgttcggccttgaactgatcatatcaggattggagaagcagctgaaggcagaaagtgggtct

SEQ ID NO: 1217 - DNA, 621 bp, Artificial Sequence
  Nucleotides encoding Sulfonylurea responsive repressor
atgggatctagattagataaaagtaaagtgattaacagcgcattagagctgcttaatgaggtcggaatcgaaggtttaacaacccgtaaactcgcccagaagctaggtgtagagcagcctacattgtattggcatgtaaaaaataagcgagctctgctagacgctatggccatcgagatgctcgatcgccacgctacccactatttaccattggaaggggcaagctggcaaaatttcttgaggaacaacgctaagtccatgagaaacgctttgctcagtcaccgtgatggagccaaggtctgtctaggtacgggcttcacggagcaacaatatgaaactgcggagaaccgccttgccttcctgacacaacaaggtttctcccttgagcaggccctctacgcatggcaagcagtggggatctacactctgggttgtgtcttgctggatcaagagctgcaagtcgctaaggaggagagggaaacacctactgatagtatgccgccactggttcgacaagcttgggaactcaaggatcaccaaggtgcagagccagccttcctgttcggccttgaactgatcatatcaggattggagaagcagctgaaggcagaaagtgggtct

SEQ ID NO: 1218 - DNA, 624 bp, Artificial Sequence
  Nucleotides encoding Sulfonylurea responsive repressor
atgggatctagattagataaaagtaaagtgattaacagcgcattagagctgcttaatgaggtcggaatcgaaggtttaacaacccgtaaactcgcccagaagctaggtgtagagcagcctacattgtattggcatgtaaaaaataagcgagctctgctagacgctatggccttcgagatgctcgatcgccacgctccccactatttaccattggaaggggcaagctggcaaaatttcttgaggaacaacgctaagtccatgagaaacgctttgctcagtcaccgtgatggagccaaggtctgtctaggtacgggcttcacggagcaacaatatgaaactgcggagaaccaccttgccttcctgacacaacaaggtttctcccttgagaacgccctctacgcatggcaagcagtggggatctacactctgggttgtgtcttgctggatcaacagctgcaagtcgctaaggaggagagggaaacacctactactgatagtatgccgccactggttcgacaagcttgggaactcaaggatcaccaaggtgcagagccagccttcctgttcggccttgaactgatcatatcaggattggagaagcagctgaaggcagaaagtgggtct

SEQ ID NO: 1219 - DNA, 622 bp, Artificial Sequence
  Nucleotides encoding Sulfonylurea responsive repressor
atgggatctagattagataaaagtaaagtgattaacagcgcattagagctgcttaatgaggtcggaatcgaaggtttaacaacccgtaaactcgcccagaagctaggtgtagagcagcctacattgtattggcatgtaaaaaataagcgagctctgctagacgctatggccatcgagatgctcgatcgccacgctacccactatttaccattggaaggggaaagctggcaaaatttcttgaggaacaacgctaagtccatgagaaacgctttgctcagtcaccgtgatggagccaaggtctgtctaggtacgggcttcacggagcaacaatatgaaactgcggagaaccgccttgccttcctgacacaacaaggtttctcccttgagaacgccctctacgcatggcaagcagtggggatctacactctgggttgtgtcttgctggatcaagagctgcaagtcgctaaggaggagagggaaacacctactactgatagtatgccgccactggttcgacaagcttgggaactcaaggatcaccaaggtgcagagccagccttcctgttcggccttgaactgatcatatcaggattggagaagagctgaaggagaaagtgggtct

SEQ ID NO: 1220 - DNA, 621 bp, Artificial Sequence
  Nucleotides encoding Sulfonylurea responsive repressor
atggccagactcgacaagagcaaggtgatcaacagcgcactggagctgctgaacgaggtcggaatcgaaggcctcacaacccgtaagctcgcccagaagctcggggttgagcagcctacattgtactggcacgtcaagaacaagcgagctctgctagacgctatggccatcgagatgctcgatcgccacgctatacactatttaccattggaaggggcaagctggcaaaatttcttgaggaacaacgctaagtccatgagaaacgctttgctcagtcaccgtgatggagccaaggtctgtctaggtacgggcttcacggagcaacaatatgaaactgcggagaacagccttgccttcctgacacaacaaggtttctcccttgagcaggccctctacgcatggcaagcagtggggatctacactctgggttgtgtcttgctggatcaagagctgcaattcgctaaggaggagagggaaacacctactactgatagtatgccgccactggttcgacaagctgtagaactcaaggatcaccaaggtgcagagccagccttcctgttcggccttgaactgatcatatcaggattggagaagcagctgaaggcagaaagtgggtct

SEQ ID NO: 1221 - DNA, 621 bp, Artificial Sequence
  Nucleotides encoding Sulfonylurea responsive repressor
atggccagactcgacaagagcaaggtgatcaacagcgcactggagctgctgaacgaggtcggaatcgaaggcctcacaacccgtaagctcgcccagaagctcggggttgagcagcctacattgtactggcacgtcaagaacaagcgagctctgctagacgctatggccatcgagatgctcgatcgccacgctatacactatttaccattggaaggggaaagctggcaaaatttcttgaggaacaacgctaagtccatgagaaacgctttgctcagtcaccgtgatggagccaaggtctgtctaggtacgggcttcacggagcaacaatatgaaactgcggagaaccgccttgccttcctgacacaacaaggtttctcccttgagaaggccctctacgcatggcaagcagtggggatctacactctgggttgtgtcttgctggatcaagagctgcaagtcgctaaggaggagagggaaacacctactactgatagtatgccgccactggttcgacaagcttgggaactcaaggatcaccaaggtgcagagccagccttcctgttcggccttgaacttatcatatcaggattggagaagcagctgaaggcagaaagtgggtct

SEQ ID NO: 1222 - DNA, 621 bp, Artificial Sequence
  Nucleotides encoding Sulfonylurea responsive repressor
atggccagactcgacaagagcaaggtgatcaacagcgcactggagctgctgaacgaggtcggaatcgaaggcctcacaacccgtaagctcgcccagaagctcggggttgagcagcctacattgtactggcacgtcaagaacaagcgagctctgctagacgctatggccatcgagatgctcgatcgccacgctatacactatttaccattggaaggggaaagctggcaaaatttcttgaggaacaacgctaagtccatgagaaacgctttgctcagtcaccgtgatggagccaaggtctgtctaggtacgggcttcacggagcaacaatatgaaactgcggagaaccgccttgccttcctgacacaacaaggtttctcccttgagaacgccctctacgcatggcaagcagtggggatctacactctgggttgtgtcttgctggatcaagagctgcaagtcgctaaggaggagagggaaacacctactactgatagtatgccgccactggttcgacaagcttgggaactcaaggatcaccaaggtgcagagccagccttcctgttcggccttgaactgatcatatcaggattggagaagcagctgaaggcagaaagtgggtct

SEQ ID NO: 1223 - DNA, 621 bp, Artificial Sequence; identical to SEQ ID NO: 1222
  Nucleotides encoding Sulfonylurea responsive repressor

SEQ ID NO: 1224 - DNA, 621 bp, Artificial Sequence; identical to SEQ ID NO: 1222
  Nucleotides encoding Sulfonylurea responsive repressor

SEQ ID NO: 1225 - DNA, 621 bp, Artificial Sequence
  Nucleotides encoding Sulfonylurea responsive repressor
atggccagactcgacaagagcaaggtgatcaacagcgcactggagctgctgaacgaggtcggaatcgaaggcctcacaacccgtaagctcgcccagaagctcggggttgagcagcctacattgtactggcacgtcaagaacaagcgagctctgctagacgctatggccttcgagatgctcgatcgccacgctacccactatttaccattggaaggggaaagctggcaaaatttcttgaggaacaacgctaagtccatgagaaacgctttgctcagtcaccgtgatggagccaaggtctgtctaggtacgggcttcacggagcgacaatatgaaactgcggagaaccgccttgccttcctgacacaacaaggtttctcccttgagaacgccctctacgcatggcaagcagtggggatctacactctgggttgtgtcttgctggatcaagagctgcaagtcgctaaggaggagagggaaacacctactactgatagtatgccgccactggttcgacaagcttgggaactcaaggatcaccaaggtgcagagccagccttcctgttcggccttgaactgatcatatcaggattggagaagcagctgaaggcagaaagtgggtct

SEQ ID NO: 1226 - DNA, 621 bp, Artificial Sequence
  Nucleotides encoding Sulfonylurea responsive repressor
atggccagactcgacaagagcaaggtgatcaacagcgcactggagctgctgaacgaggtcggaatcgaaggcctcacaacccgtaagctcgcccagaagctcggggttgagcagcctacattgtactggcacgtcaagaacaagcgagctctgctagacgctatggccttcgagatgctcgatcgccacgctatacactatttaccattggaaggggcaagctggcaaaatttcttgaggaacaacgctaagtccatgagaaacgctttgctcagtcaccgtgatggagccaagctctgtcttggtacgggcttcacggagcaacaatatgaaactgcggagaaccgccttgccttcctgacacaacaaggtttctcccttgagcaggccctctacgcatggcaagcagtggggatctacactctgggttgtgtcttgctggatcaagagctgcaagtcgctaaggaggagagggaaacacctactactgatagtatgccgccactggttcgacaagcttgggaactcaaagatcaccaaggtgcagagccagccttcctgttcggccttgaactgatcatatcaggattggagaagcagctgaaggcagaaagtgggtct

SEQ ID NO: 1227 - DNA, 621 bp, Artificial Sequence
  Nucleotides encoding Sulfonylurea responsive repressor
atggccagactcgacaagagcaaggtgatcaacagcgcactggagctgctgaacgaggtcggaatcgaaggcctcacaacccgtaagctcgcccagaagctcggggttgagcagcctacattgtactggcacgtcaagaacaagcgagctctgctagacgctatggctatcgagatgctcgatcgccacgctatacactatttaccattggaaggggaaagctggcaaaatttcttgaggaacaacgctaagtccatgagaaacgctttgctcagtcaccgtgatggagccaaggtctgtctaggtacgggcttcacggagcaacaatatgaaactgcggagaaccgccttgccttcctgacacaacaaggtttctcccttgagaacgccctctacgcatggcaagcagtggggatctacactctgggttgtgtcttgctggatcaagagctgcaagtcgctaaggaggagagggaaacacctactactgatagtatgccgccactggttcgacaagcttgggaactcaaggatcaccaaggtgcagagccagccttcctgttcggccttgaactgatcatatcaggattggagaagcagctgaaggcagaaagtgggtct

SEQ ID NO: 1228 - DNA, 621 bp, Artificial Sequence
  Nucleotides encoding Sulfonylurea responsive repressor
atggccagactcgacaagagcaaggtgatcaacagcgcactggagctgctgaacgaggtcggaatcgaaggcctcacaacccgtaagctcgcccagaagctcggggttgagcagcctacattgtactggcacgtcaagaacaagcgagctctgctagacgctatggccatcgagatgctcgatcgccacgctatacactatttaccattggaaggggaaagctggcaaaatttcttgaggaacaacgctaagtccatgagaaacgctttgctcagtcaccgtgatggagccaaggtctgtctaggtacgggcttcacggagcaacaatatgaaactgcggagaaccgccttgccttcctgacacaacaaggtttctcccttgagcaggccctctacgcatggcaagcagtggggatctacactctgggttgtgtcttgctggatcaagagctgcaagtcgctaaggaggagagggaaacacctactactgatagtatgccgccactggttcgacaagcttgggaactcaaggatcaccaaggttcagagccagccttcctgttcggccttgaactgatcatatcaggattggagaagcagctgaaggcagaaagtgggtat

SEQ ID NO: 1229 - DNA, 621 bp, Artificial Sequence
  Nucleotides encoding Sulfonylurea responsive repressor
atggccagactcgacaagagcaaggtgatcaacagcgcactggagctgctgaacgaggtcggaatcgaaggcctcacaacccgtaagctcgcccagaagctcggggttgagcagcctacattgtactggcacgtcaagaacaagcgagctctgctagacgctatggccatcgagatgctcgatcgccacgctatacactatttaccattggaaggggaaagctggcaaaatttcttgaggaacaacgctaagtccatgagaaacgctttgctcagtcaccgtgatggagccaaggtctgtctaggtacgggcttcacggagcaacaatatgaaactgcggagaaccgccttgccttcctgacacaacaaggtttctcccttgagaacgccctctacgcatggcaagcagtggggatctacactctgggttgtgtcttgctggatcaagagctgcaagtcgctaaggaggagagggaaacacctactactgatagtatgccgccactggttcgacaagctttagaactcaaggatcaccaaggtgcagagccagccttcctgttcggccttgaactgatcatatcaggattggagaagcagctgaaggcagaaagtgggtct

SEQ ID NO: 1230 - DNA, 618 bp, Artificial Sequence
  Nucleotides encoding Sulfonylurea responsive repressor
atggccagactcgacaagagcaaggtgatcaacagcgcactggagctgctgaacgaggtcggaatcgaaggcctcacaacccgtaagctcgcccagaagctcggggttgagcagcctacattgtactggcacgtcaagaacaagcgagctctgctagacgctatggccatcgagatgctcgatcgccacgctatacactatttaccattggaaggggaaagctggcaaaatttcttgaggaacaacgctaagtccatgagaaacgctttgctcagtcaccgtgatggagccaaggtctgtctaggtacgggcttcacggagcaacaatatgaaactgcggagaaccgccttgccttcctgacacaacaaggtttctcccttgagcaggccctctacgcatggcaagcagtggggatctacactctgggttgtgtcttgctggatcaagagctgcaagtcgctaaggaggagagggaaacacctactactgatagtatgccgccactggttcgacaagcttgggaactcaaggatcaccaaggtgcagagccagccttcctgttcggccttgaactgatcatatcaggattggagaagctgaaggcagaaagtgggtct

SEQ ID NO: 1231 - DNA, 621 bp, Artificial Sequence
  Nucleotides encoding Sulfonylurea responsive repressor
atggccagactcgacaagagcaaggtgatcaacagcgcactggagctgctgaacgaggtcggaatcgaaggcctcacaacccgtaagctcgcccagaagctcggggttgagcagcctacattgtactggcacgtcaagaacaagcgagctctgctagacgctatggccatcgagatgctcgatcgccacgctacccactttttaccattggaaggggaaagctggcaaaatttcttgaggaacaacgctaagtccatgagaaacgctttgctcagtcaccgtgatggagccaaggtctgtctaggtacgggcttcacgaagcaacaatatgaaactgcggagaaccgccttgccttcctgacacaacaaggtttctcccttgagcaggccctctacgcatggcaagcagtggggatctacactctgggttgtgtcttgctggatcaagagctgcaagtcgctaaggaggagagggaaacacctactactgatagtatgccgccactggttcgacaagcttgggaactcaaggatcaccaaggtgcagagccagccttcctgttcggccttgaactgatcatatcaggattggagaagcagctgaaggcagaaagtgggtct

SEQ ID NO: 1232 - DNA, 624 bp, Artificial Sequence
  Nucleotides encoding Sulfonylurea responsive repressor
atgggatctagattagataaaagtaaagtgattaacagcgcattagagctgcttaatgaggtcggaatcgaaggtttaacaacccgtaaactcgcccagaagctaggtgtagagcagcctacattgtattggcatgtaaaaaataagcgagctctgctagacgctatggccattgagatgttggataggcacaagacccactacctgcctttggaaggggaaagctggcaagacttcttgaggaacagggctaagtccatgagaaatgctttgctcagtcaccgtgatggagccaaggtcgctctaggtacgggcttcacggagcaacagtatgaaactatggagaactcgcttgccttcctgacacaacaaggtttctcccttgagaacgccctctacgcatttcaagctgttgggatctacactctgggttgcgtcttgctggatcaagagctgcaagtcgctaaggaggagagggaaacacctactactgatagtatgccgccactggttcgacaagcttacgaactcagagatcaccaaggtgcagagccagccttcctgttcggccttgaactgatcataagtggattggagaagcagctgaaggcagaaagtgggtct

SEQ ID NO: 1233 - DNA, 624 bp, Artificial Sequence
  Nucleotides encoding Sulfonylurea responsive repressor
atgggatctagattagataaaagtaaagtgattaacagcgcattagagctgcttaatgaggtcggaatcgaaggtttaacaacccgtaaactcgcccagaagctaggtgtagagcagcctacattgtattggcatgtaaaaaataagcgagctctgctagacgctatggccattgagatgttcgataggcacaagacccactacctgcctttggaaggggaaagctggcaagacttcttgaggaacaatgctaagtccaggagaaatgctttgctcagtcaccgtgatggagccaaggtcgctctaggtacgggcttcacggagcaacagtatgaaactatggagaactgtcttgccttcctgacacaacaaggtttctcccttgagaacgccctctacgcatttcaagctgttgggatctacactctgggttgcgtcttgctggatcaagagctgcaagtcgctaaggaggagagggaaacacctactactgatagtatgccgccactggttcgacaagcttacgaactcaaagatcaccaaggtgcagagccagccttcctgttcggccttgaactgatcatatgtggattggagaagcagctgaagtgtgaaagtgggtct

SEQ ID NO: 1234 - DNA, 624 bp, Artificial Sequence
  Nucleotides encoding Sulfonylurea responsive repressor
atgggatctagattagataaaagtaaagtgattaacagcgcattagagctgcttaatgaggtcggaatcgaaggtttaacaacccgtaaactcgcccagaagctaggtgtagagcagcctacattgtattggcatgtaaaaaataagcgagctctgctagacgctatggccattgagatgttggataggcacgacacccactacctgcctttggaaggggaaagctggcaagacttcttgaggaacaatgctaagtccaggagaaatgctttgctcagtcaccgtgatggagccaaggtcgctctaggtacgggcttcacggagcaacagtatgaaactatggagaactctcttgccttcctgacacaacaaggtttctcccttgagaacgccctctacgcaatgcaagctgttgggatctacactctgggttgcgtcttgctggatcaagagctgcaagtcgctaaggaggagagggaaacacctactactgatagtatgccgccactggttcgacaagcttacgaactcaaagatcaccaaggtgcagagccagccttcctgttcggccttgaactgatcatatgtggattggagaagcagctgaagtgtgaaagtgggtct

SEQ ID NO: 1235 - DNA, 624 bp, Artificial Sequence
  Nucleotides encoding Sulfonylurea responsive repressor
atgggatctagattagataaaagtaaagtgattaacagcgcattagagctgcttaatgaggtcggaatcgaaggtttaacaacccgtaaactcgcccagaagctaggtgtagagcagcctacattgtattggcatgtaaaaaataagcgagctctgctagacgctatggccattgagatgttcgataggcacgccacccactacctgcctttggaaggggaaagctggcaagacttcttgaggaacagggctaagtccaggagaaatgctttgctcagtcaccgtgatggagccaaggtcgctctaggtacgggcttcacggagcaacagtatgaaactgctgagaactggcttgccttcctgacacaacaaggtttctcccttgagaacgccctctacgcaatgcaagctgttgggatctacactctgggttgcgtcttgctggatcaagagctgcaagtcgctaaggaggagagggaaacacctactactgatagtatgccgccactggttcgacaagcttacgaactcaaagatcaccaaggtgcagagccagccttcctgttcggccttgaactgatcatttgtggattggagaagcagctgaagtgtgaaagtgggtct

SEQ ID NO: 1236 - DNA, 624 bp, Artificial Sequence
  Nucleotides encoding Sulfonylurea responsive repressor
  misc_feature 351: n = A,T,C or G
atgggatctagattagataaaagtaaagtgattaacagcgcattagagctgcttaatgaggtcggaatcgaaggtttaacaacccgtaaactcgcccagaagctaggtgtagagcagcctacattgtattggcatgtaaaaaataagcgagctctgctagacgctatggccattgagatgttggataggcacaagacccactactgtcctttggaaggggaaagctggcaagacttcttgaggaacagggctaagtccaggagaaatgctttgctcagtcaccgtgatggagccaaggtctgcctaggtacgggcttcacggagcaacagtatgaaactgctgagaactgncttgccttcctgacacaacaaggtttctcccttgagaacgccctctacgcaatgcaagctgttgggatctacactctgggttgcgtcttgctggatcaagagctgcaagtcgctaaggaggagagggaaacacctactactgatagtatgccgccactggttcgacaagctctcgaactccacgatcaccaaggtgcagagccagccttcctgttcggccttgaactgatcatatgtggattggagaagcagctgaaggcagaaagtgggtct

SEQ ID NO: 1237 - DNA, 624 bp, Artificial Sequence
  Nucleotides encoding Sulfonylurea responsive repressor
atgggatctagattagataaaagtaaagtgattaacagcgcattagagctgcttaatgaggtcggaatcgaaggtttaacaacccgtaaactcgcccagaagctaggtgtagagcagcctacattgtattggcatgtaaaaaataagcgagctctgctagacgctatggccattgagatgttggataggcacgccacccactacctgcctttggaaggggaaagctggcaagacttcttgaggaacaaggctaagtccatgagaaatgctttgctcagtcaccgtgatggagccaaggtcgctctaggtacgggcttcacggagcaacagtatgaaactgctgagaactctcttgccttcctgacacaacaaggtttctcccttgagaacgccctctacgcaatgcaagctgttgggatctacactctgggttgcgtcttgctggatcaagagctgcaagtcgctaaggaggagagggaaacacctactactgatagtatgccgccactggttcgacaagctctcgaactccacgatcaccaaggtgcagagccagccttcctgttcggccttgaactgatcataagtggattggagaagcagctgaaggcagaaagtgggtct

SEQ ID NO: 1238 - DNA, 624 bp, Artificial Sequence
  Nucleotides encoding Sulfonylurea responsive repressor
atgggatctagattagataaaagtaaagtgattaacagcgcattagagctgcttaatgaggtcggaatcgaaggtttaacaacccgtaaactcgcccagaagctaggtgtagagcagcctacattgtattggcatgtaaaaaataagcgagctctgctagacgctatggccattgagatgttcgataggcacgccacccactacctgcctttggaaggggaaagctggcaagacttcttgaggaacagggctaagtccatgagaaatgctttgctcagtcaccgtgatggagccaaggtcgctctaggtacgggcttcacggagcaacagtatgaaactgctgagaactcgcttgccttcctgacacaacaaggtttctcccttgagaacgccctctacgcatttcaagctgttgggatctacactctgggttgcgtcttgctggatcaagagctgcaagtcgctaaggaggagagggaaacacctactactgatagtatgccgccactggttcgacaagctctcgaactccacgatcaccaaggtgcagagccagccttcctgttcggccttgaactgatcataagtggattggagaagcagctgaagtgtgaaagtgggtct

SEQ ID NO: 1239 - DNA, 624 bp, Artificial Sequence
  Nucleotides encoding Sulfonylurea responsive repressor
atgggatctagattagataaaagtaaagtgattaacagcgcattagagctgcttaatgaggtcggaatcgaaggtttaacaacccgtaaactcgcccagaagctaggtgtagagcagcctacattgtattggcatgtaaaaaataagcgagctctgctagacgctatggccattgagatgttggataggcacgccacccactacctgcctttggaaggggaaagctggcaagacttcttgaggaacagggctaagtccatgagaaatgctttgctcagtcaccgtgatggagccaaggtcgctctaggtacgggcttcacggagcaacagtatgaaactatggagaactcgcttgccttcctgacacaacaaggtttctcccttgagaacgccctctacgcaatgcaagctgttgggatctacactctgggttgcgtcttgctggatcaagagctgcaagtcgctaaggaggagagggaaacacctactactgatagtatgccgccactggttcgacaagcttacgaactcagagatcaccaaggtgcagagccagccttcctgttcggccttgaactgatcataagtggattggagaagcagctgaagtgtgaaagtgggtct

SEQ ID NO: 1240 - DNA, 624 bp, Artificial Sequence
  Nucleotides encoding Sulfonylurea responsive repressor
atgggatctagattagataaaagtaaagtgattaacagcgcattagagctgcttaatgaggtcggaatcgaaggtttaacaacccgtaaactcgcccagaagctaggtgtagagcagcctacattgtattggcatgtaaaaaataagcgagctctgctagacgctatggccattgagatgttggataggcacgccacccactactgtcctttggaaggggaaagctggcaagacttcttgaggaacaaggctaagtccatgagaaatgctttgctcagtcaccgtgatggagccaaggtcgctctaggtacgggcttcacggagcaacagtatgaaactatggagaactcgcttgccttcctgacacaacaaggtttctcccttgagaacgccctctacgcatttcaagctgttgggatctacactctgggttgcgtcttgctggatcaagagctgcaagtcgctaaggaggagagggaaacacctactactgatagtatgccgccactggttcgacaagcttacgaactcaaagatcaccaaggtgcagagccagccttcctgttcggccttgaactgatcatatgtggattggagaagcagctgaaggcagaaagtgggtct

SEQ ID NO: 1241 - DNA, 624 bp, Artificial Sequence
  Nucleotides encoding Sulfonylurea responsive repressor
atgggatctagattagataaaagtaaagtgattaacagcgcattagagctgcttaatgaggtcggaatcgaaggtttaacaacccgtaaactcgcccagaagctaggtgtagagcagcctacattgtattggcatgtaaaaaataagcgagctctgctagacgctatggccattgagatgttcgataggcacgacacccactactgtcctttggaaggggaaagctgtcaagacttcttgaggaacaaggctaagtccatgagaaatgctttgctcagtcaccgtgatggagccaaggtcgctctaggtacgggcttcacggagcaacagtatgaaactgctgagaactctcttgccttcctgacacaacaaggtttctcccttgagaacgccctctacgcatttcaagctgttgggatctacactctgggttgcgtcttgctggatcaagagctgcaagtcgctaaggaggagagggaaacacctactactgatagtatgccgccactggttcgacaagctatcgaactccacgatcaccaaggtgcagagccagccttcctgttcggccttgaactgatcataagtggattggagaagcagctgaagtgtgaaagtgggtct

SEQ ID NO: 1242 - DNA, 624 bp, Artificial Sequence
  Nucleotides encoding Sulfonylurea responsive repressor
atgggatctagattagataaaagtaaagtgattaacagcgcattagagctgcttaatgaggtcggaatcgaaggtttaacaacccgtaaactcgcccagaagctaggtgtagagcagcctacattgtattggcatgtaaaaaataagcgagctctgctagacgctatggccattgagatgttggataggcacgccacccactactgtcctttggaaggggaaagctggcaagacttcttgaggaacaaggctaagtccatgagaaatgctttgctcagtcaccgtgatggagccaaggtcgctctaggtacgggcttcacggagcaacagtatgaaactatggagaactctcttgccttcctgacacaacaaggtttctcccttgagaacgccctctacgcaatgcaagctgttgggatctacactctgggttgcgtcttgctggatcaagagctgcaagtcgctaaggaggagagggaaacacctactactgatagtatgccgccactggttcgacaagcttacgaactcaaagatcaccaaggtgcagagccagccttcctgttcggctttgaactgatcatatgtggattggagaagcagctgaagtgtgaaagtgggtct

SEQ ID NO: 1243 - DNA, 624 bp, Artificial Sequence
  Nucleotides encoding Sulfonylurea responsive repressor
atgggatctagattagataaaagtaaagtgattaacagcgcattagagctgcttaatgaggtcggaatcgaaggtttaacaacccgtaaactcgcccagaagctaggtgtagagcagcctacattgtattggcatgtaaaaaataagcgagctctgctagacgctatggccattgagatgttcgataggcacgacacccactactgtcctttggaaggggaaagctggcaagacttcttgaggaacaatgctaagtccaggagaaatgctttgctcagtcaccgtgatggagccaaggtcgctctaggtacgggcttcacggagcaacagtatgaaactatggagaactctcttgccttcctgacacaacaaggtttctcccttgagaacgccctctacgcatttcaagctgttgggatctacactctgggttgcgtcttgctggatcaagagctgcaagtcgctaaggaggagagggaaacacctactactgatagtatgccgccactggttcgacaagcttaccaactcaaagatcaccaaggtgcagagccagccttcctgttcggccttgaactgatcatatgtggattggagaagcagctgaaggcagaaagtgggtct

SEQ ID NO: 1244 - DNA, 624 bp, Artificial Sequence
  Nucleotides encoding Sulfonylurea responsive repressor
atgggatctagattagataaaagtaaagtgattaacagcgcattagagctgcttaatgaggtcggaatcgaaggtttaacaacccgtaaactcgcccagaagctaggtgtagagcagcctacattgtattggcatgtaaaaaataagcgagctctgctagacgctatggccattgagatgttggataggcacaagacccactactgtcctttggaaggggaaagctggcaagacttcttgaggaacaaggctaagtccatgagaaatgctttgctcagtcaccgtgatggagccaaggtcgctctaggtacgggcttcacggagcaacagtatgaaactgctgagaactgtcttgccttcctgacacaacaaggtttctcccttgagaacgccctctacgcatttcaagctgttgggatctacactctgggttgcgtcttgctggatcaagagctgcaagtcgctaaggaggagagggaaacacctactactgatagtatgccgccactggttcgacaagctttcgaactcaaagatcaccaaggtgcagagccagccttcctgttcggccttgaactgatcatatgtggattggagaagcagctgtagtgtgaaagtgggtct

SEQ ID NO: 1245 - DNA, 624 bp, Artificial Sequence
  Nucleotides encoding Sulfonylurea responsive repressor
atgggatctagattagataaaagtaaagtgattaacagcgcattagagctgcttaatgaggtcggaatcgaaggtttaacaacccgtaaactcgcccagaagctaggtgtagagcagcctacattgtattggcatgtaaaaaataagcgagctctgctagacgctatggccattgagatgttggataggcacaagacccactacctgcctttggaaggggaaagctggcaagacttcttgaggaacaaggctaagtccatgagaaatgctttgctcagtcaccgtgatggagccaaggtcgctctaggtacgggcttcacggagcaacagtatgaaactgctgagaactcgcttgccttcctgacacaacaaggtttctcccttgagaacgccctctacgcatttcaagctgttgggatctacactctgggttgcgtcttgctggatcaagagctgcaagtcgctaaggaggagagggaaacacctactactgatagtatgccgccactggttcgacaagctctcgaactccacgatcaccaaggtgcagagccagccttcctgttcggccttgaactgatcataagtggattggagaagcagctgaaggcagaaagtgggtct

SEQ ID NO: 1246 - DNA, 624 bp, Artificial Sequence
  Nucleotides encoding Sulfonylurea responsive repressor
atgggatctagattagataaaagtaaagtgattaacagcgcattagagctgcttaatgaggtcggaatcgaaggtttaacaacccgtaaactcgcccagaagctaggtgtagagcagcctacattgtattggcatgtaaaaaataagcgagctctgctagacgctatggccattgagatgttggataggcacgacacccactactgtcctttggaaggggaaagctggcaagacttcttgaggaacaaggctaagtccatgagaaatgctttgctcagtcaccgtgatggagccaaggtcgctctaggtacgggcttcacggagcaacagtatgaaactgctgagaactgtcttgccttcctgacacaacaaggtttctcccttgagaacgccctctacgcatttcaagctgttgggatctacactctgggttgcgtcttgctggatcaagagctgcaagtcgctaaggaggagagggaaacacctactactgatagtatgccgccactggttcgacaagctatcgaactccacgatcaccaaggtgcagagccagccttcctgttcggccttgaactgatcataagtggattggagaagcagctgaagtgtgaaagtgggtct

SEQ ID NO: 1247 - DNA, 624 bp, Artificial Sequence
  Nucleotides encoding Sulfonylurea responsive repressor
atgggatctagattagataaaagtaaagtgattaacagcgcattagagctgcttaatgaggtcggaatcgaaggtttaacaacccgtaaactcgcccagaagctaggtgtagagcagcctacattgtattggcatgtaaaaaataagcgagctctgctagacgctatggccattgagatgttcgataggcacaagacccactactgtcctttggaaggggaaagctggcaagacttcttgaggaacagggctaagtccatgagaaatgctttgctcagtcaccgtgatggagccaaggtcgctctaggtacgggcttcacggagcaacagtatgaaactatggagaactcgcttgccttcctgacacaacaaggtttctcccttgagaacgccctctacgcaatgcaagctgttgggatctacactctgggttgcgtcttgctggatcaagagctgcaagtcgctaaggaggagagggaaacacctactactgatagtatgccgccactggttcgacaagcttacgaactcaaagatcaccaaggtgcagagccagccttcctgttcggccttgaactgatcatatgtggattggagaagcagctgaaggcagaaagtgggtct

SEQ ID NO: 1248 - DNA, 624 bp, Artificial Sequence
  Nucleotides encoding Sulfonylurea responsive repressor
atgggatctagattagataaaagtaaagtgattaacagcgcattagagctgcttaatgaggtcggaatcgaaggtttaacaacccgtaaactcgcccagaagctaggtgtagagcagcctacattgtattggcatgtaaaaaataagcgagctctgctagacgctatggccattgagatgttcgataggcacgccacccactacctgcctttggaaggggaaagctggcaagacttcttgaggaacagggctaagtccatgagaaatgctttgctcagtcaccgtgatggagccaaggtcgctctaggtacgggcttcacggagcaacagtatgaaactatggagaactcgcttgccttcctgacacaacaaggtttctcccttgagaacgccctctacgcaatgcaagctgttgggatctacactctgggttgcgtcttgctggatcaagagctgcaagtcgctaaggaggagagggaaacacctactactgatagtatgccgccactggttcgacaagctatcgaactccacgatcaccaaggtgcagagccagccttcctgttcggccttgaactgatcataagtggattggagaagcagctgaaggcagaaagtgggtct

SEQ ID NO: 1249 - DNA, 624 bp, Artificial Sequence
  Nucleotides encoding Sulfonylurea responsive repressor
atgggatctagattagataaaagtaaagtgattaacagcgcattagagctgcttaatgaggtcggaatcgaaggtttaacaacccgtaaactcgcccagaagctaggtgtagagcagcctacattgtattggcatgtaaaaaataagcgagctctgctagacgctatggccattgagatgttcgataggcacaagacccactacctgcctttggaaggggaaagctggcaagacttcttgaggaacaatgctaagtccaggagaaatgctttgctcagtcaccgtgatggagccaaggtcgctctaggtacgggcttcacggagcaacagtatgaaactatggagaactcgcttgccttcctgacacaacaaggtttctcccttgagaacgccctctacgcaatgcaagctgttgggatctacactctgggttgcgtcttgctggatcaagagctgcaagtcgctaaggaggagagggaaacacctactactgatagtatgccgccactggttcgacaagcttacgaactcaaagatcaccaaggtgcagagccagccttcctgttcggccttgaactgatcatatgtggattggagaagcagctgaagtgtgaaagtgggtct

SEQ ID NO: 1250 - DNA, 624 bp, Artificial Sequence
  Nucleotides encoding Sulfonylurea responsive repressor
atgggatctagattagataaaagtaaagtgattaacagcgcattagagctgcttaatgaggtcggaatcgaaggtttaacaacccgtaaactcgcccagaagctaggtgtagagcagcctacattgtattggcatgtaaaaaataagcgagctctgctagacgctatggccattgagatgttcgataggcacgccacccactacctgcctttggaaggggaaagctggcaagacttcttgaggaacaatgctaagtccaggagaaatgctttgctcagtcaccgtgatggagccaaggtcgctctaggtacgggcttcacggagcaacagtatgaaactatggagaactcgcttgccttcctgacacaacaaggtttctcccttgagaacgccctctacgcatttcaagctgttgggatctacactctgggttgcgtcttgctggatcaagagctgcaagtcgctaaggaggagagggaaacacctactactgatagtatgccgccactggttcgacaagcttacgaactcaaagatcaccaaggtgcagagccagccttcctgttcggccttgaactgatcatatgtggattggagaagcagctgaagtgtgaaagtgggtct

SEQ ID NO: 1251 - DNA, 622 bp, Artificial Sequence
  Nucleotides encoding Sulfonylurea responsive repressor
atgggatctagattagataaaagtaaagtgattaacagcgcattagagctgcttaatgaggtcggaatcgaaggtttaacaacccgtaaactcgcccagaagctaggtgtagagcagcctacattgtattggcatgtaaaaaataagcgagctctgctagacgctatggccattgagatgttcgataggcacgacacccactacctgcctttggaaggggaaagctggcaagacttcttgaggaacaaggctaagtccatgagaaatgctttgctcagtcaccgtgatggagccaaggtcgctctaggtacgggcttcacggagcaacagtatgaaactatggagaactcgcttgccttcctgacacaacaaggtttctcccttgagaacgccctctacgcaatgcaagctgttgggatctacactctgggttgcgtcttgctggatcaagagctgcaagtcgctaaggaggagagggaaacacctactactgatagtatgccgccactggttcgacaagctatcgaactccacgatcaccaaggtgcagagccagccttcctgttcggccttgaacagatcataagtggattggagaagcagctgaaggcagaaagtgtct

SEQ ID NO: 1252 - DNA, 624 bp, Artificial Sequence
  Nucleotides encoding Sulfonylurea responsive repressor
atgggatctagattagataaaagtaaagtgattaacagcgcattagagctgcttaatgaggtcggaatcgaaggtttaacaacccgtaaactcgcccagaagctaggtgtagagcagcctacattgtattggcatgtaaaaaataagcgagctctgctagacgctatggccattgagatgttcgataggcacgacacccactactgtcctttggaaggggaaagctggcaagacttcttgaggaacaatgctaagtccaggagaaatgctttgctcagtcaccgtgatggagccaaggtcgctctaggtacgggcttcacggagcaacagtatgaaactatggagaactctcttgccttcctgacacaacaaggtttctcccttgagaacgccctctacgcatttcaagctgttgggatctacactctgggttgcgtcttgctggatcaagagctgcaagtcgctaaggaggagagggaaacacctactactgatagtatgccgccactggttcgacaagcttacgaactcaaagatcaccaaggtgcagagccagccttcctgttcggccttgaactgatcataagtggattggagaagcagctgaagtgtgaaagtgggtct

SEQ ID NO: 1253 - DNA, 624 bp, Artificial Sequence
  Nucleotides encoding Sulfonylurea responsive repressor
atgggatctagattagataaaagtaaagtgattaacagcgcattagagctgcttaatgaggtcggaatcgaaggtttaacaacccgtaaactcgcccagaagctaggtgtagagcagcctacattgtattggcatgtaaaaaataagcgagctctgctagacgctatggccattgagatgttggataggcacgacacccactactgtcctttggaaggggaaagctggcaagacttcttgaggaacaaggctaagtccatgagaaatgctttgctcagtcaccgtgatggagccaaggtcgctctaggtacgggcttcacggagcaacagtatgaaactgctgagaactcgcttgccttcctgacacaacaaggtttttcccttgagaacgccctctacgcatttcaagctgttgggatctacactctgggttgcgtcttgctggatcaagagctgcaagtcgctaaggaggagagggaaacacctactactgatagtatgccgccactggttcgacaagctctcgaactccacgatcaccaaggtgcagagccagccttcctgttcggccttgaactgatcataagtggattggagaagcagctgaagtgtgaaagtgggtct

SEQ ID NO: 1254 - DNA, 624 bp, Artificial Sequence
  Nucleotides encoding Sulfonylurea responsive repressor
atgggatctagattagataaaagtaaagtgattaacagcgcattagagctgcttaatgaggtcggaatcgaaggtttaacaacccgtaaactcgcccagaagctaggtgtagagcagcctacattgtattggcatgtaaaaaataagcgagctctgctagacgctatggccattgagatgttggataggcacaagacccactactgtcctttggaaggggaaagctggcaagacttcttgaggaacaaggctaagtccatgagaaatgctttgctcagtcaccgtgatggagccaaggtcgctctaggtacgggcttcacggagcaacagtatgaaactgctgagaactcgcttgccttcctgacacaacaaggtttctcccttgagaacgccctctacgcatttcaagctgttgggatctacactctgggttgcgtcttgctggatcaagagctgcaagtcgctaaggaggagagggaaacacctactactgaaagtatgccgccactggttcgacaagcttacgaactcaaagatcaccaaggtgcagagccagccttcctgttcggccttgaactgatcataagtggattggagaagcagctgaagtgtgaaagtgggtct

SEQ ID NO: 1255 - DNA, 625 bp, Artificial Sequence
  Nucleotides encoding Sulfonylurea responsive repressor
atgggatctagattagataaaagtaaagtgattaacagcgcattagagctgcttaatgaggtcggaatcgaaggtttaacaacccgtaaactcgcccagaagctaggtgtagagcagcctacattgtattggcatgtaaaaaataagcgagctctgctagacgctatggccattgagatgttcgataggcacgacacccactactgtcctttggaaggggaaagctggcaagacttcttgaggaacaaggctaagtccatgagaaatgctttgctcagtcaccgtgatggagccaaggtcgctctaggtacgggcttcacggagcaacagtatgaaactgctgagaactgtcttgccttcctgacacaacaaggtttctcccttgagaacgccctctacgcatttcaagctgttgggatctacactctgggttgcgtcttgctggatcaagagctgcaagtcgctaaggaggagagggaaacacctactactgatagtatgccgccactggttcgacaagcttacgaactcagagatcaccaaggtgcagagccagccttcctgttcggccttgaactgatcataagtggattggagaagcagctgaaggcaggaaagtgggtct

SEQ ID NO: 1256 - DNA, 624 bp, Artificial Sequence
  Nucleotides encoding Sulfonylurea responsive repressor
atgggatctagattagataaaagtaaagtgattaacagcgcattagagctgcttaatgaggtcggaatcgaaggtttaacaacccgtaaactcgcccagaagctaggtgtagagcagcctacattgtattggcatgtaaaaaataagcgagctctgctagacgctatggccattgagatgttggataggcacaagacccactactgtcctttggaaggggaaagctggcaagacttcttgaggaacagggctaagtccatgagaaatgctttgctcagtcaccgtgatggagccaaggtcgctctaggtacgggcttcacggagcaacagtatgaaactatggagaactcgcttgccttcctgacacaacaaggtttctcccttgagaacgccctctacgcatttcaagctgttgggatctacactctgggttgcgtcttgctggatcaagagctgcaagtcgctaaggaggagagggaaacacctactactgatagtatgccgccactggttcgacaagcttacgaactcaaagatcaccaaggtgcagagccagccttcctgttcggccttgaactgatcataagtggattggagaagcagctgaagtgtgaaagtgggtct

SEQ ID NO: 1257 - DNA, 624 bp, Artificial Sequence
  Nucleotides encoding Sulfonylurea responsive repressor
atgggatctagattagataaaagtaaagtgattaacagcgcattagagctgcttaatgaggtcggaatcgaaggtttaacaacccgtaaactcgcccagaagctaggtgtagagcagcctacattgtattggcatgtaaaaaataagcgagctctgctagacgctatggccattgagatgttcgataggcacgacacccactactgtcctttggaaggggaaagctggcaagacttcttgaggaacaaggctaagtccatgagaaatgctttgctcagtcaccgtgatggagccaaggtcgctctaggtacgggcttcacggagcaacagtatgaaactgctgagaactgtcttgccttcctgacacaacaaggtttctcccttgagaacgccctctacgcatttcaagctgttgggatctacactctgggttgcgtcttgctggatcaagagctgcaagtcgctaaggaggagagggaaacacctactactgatagtatgccgccactggttcgacaagctatcgaactccacgatcaccaaggtgcagagccagccttcctgttcggccttgaactgatcataagtggattggagaagcagctgaaggcagaaagtgggtct

SEQ ID NO: 1258 - DNA, 625 bp, Artificial Sequence
  Nucleotides encoding Sulfonylurea responsive repressor
  misc_feature 250, 341, 525, 533, 535, 572, 587, 612: n = A,T,C or G
atgggatctagattagataaaagtaaagtgattaacagcgcattagagctgcttaatgaggtcggaatcgaaggtttaacaacccgtaaactcgcccagaagctaggtgtagagcagcctacattgtattggcatgtaaaaaataagcgagctctgctagacgctatggccattgagatgttggataggcacaagacccactacctgtcctttggaaggggaaagctggcaagacttcttgaggaacaangctaagtccatgagaaatgctttgctcagtcaccgtgatggagccaaggtcgctctaggtacgggcttcacggagcaacagtatgaaactntggagaactctcttgccttcctgacacaacaaggtttctcccttgagaacgccctctacgcaatgcaagctgttgggatctacactctgggttgcgtcttgctggatcaagagctgcaagtcgctaaggaggagagggaaacacctactactgatagtatgccgccactggttcgacaagcttncgaactcnangatcaccaaggtgcagagccagccttcctgttcggcnttgaactgatcatangtggattggagaagcagctgaaggnagaaagtgggtct

SEQ ID NO: 1259 - DNA, 618 bp, Artificial Sequence
  Nucleotides encoding Sulfonylurea responsive repressor
atgggatctagattagataaaagtaaagtgattaacagcgcattagagctgcttaatgaggtcggaatcgaaggtttaacaacccgtaaactcgcccagaagctaggtgtagagcagcctacattgtattggcatgtaaaaaataagcgagctctgctagacgctatggccattgagatgttcgataggcacgacacccactacctgcctttggaaggggaaagctggcaagacttcttgaggaacaaggctaagtccatgagaaatgctttgctcagtcaccgtgatggagctaaggtcgctctaggtacgggcttcacggagcaacagtatgaaactatggagaactcgcttgccttcctgacacaacaaggtttctcccttgagaacgccctctacgcatttcaagctgttgggatctacactctgggttgcgtcttgctggatcaagagctgcaagtcgctaaggaggagagggaaacacctactactgatagtatgccgccactggttcgacaagcttacgaactcaaagatcaccaaggtgcagagccagccttcctgttcggccttgaactgatcatatgtggattgcagctgaagtgtgaaagtgggtct

SEQ ID NO: 1260 - DNA, 624 bp, Artificial Sequence
  Nucleotides encoding Sulfonylurea responsive repressor
atgggatctagattagataaaagtaaagtgattaacagcgcattagagctgcttaatgaggtcggaatcgaaggtttaacaacccgtaaactcgcccagaagctaggtgtagagcagcctacattgtattggcatgtaaaaaataagcgagctctgctagacgctatggccattgagatgttggataggcacgacacccactacctgcctttggaaggggaaagctggcaagacttcttgaggaacaatgctaagtccaggagaaatgctttgctcagtcaccgtgatggagccaaggtcgctctaggtacgggcttcacggagcaacagtatgaaactatggagaactcgcttgccttcctgacacaacaaggtttctcccttgagaacgccctctacgcatttcaagctgttgggatctacactctgggttgcgtcttgctggatcaagagctgcaagtcgctaaggaggagagggaaacacctactactgatagtatgccgccactggttcgacaagcttacgaactcaaagatcaccaaggtgcagagccagccttcctgttcggccttgaactgatcatatgtggattggagaagcagctgaagtgtgaaagtgggtct

SEQ ID NO: 1261 - DNA, 624 bp, Artificial Sequence
  Nucleotides encoding Sulfonylurea responsive repressor
atgggatctagattagataaaagtaaagtgattaacagcgcattagagctgcttaatgaggtcggaatcgaaggtttaacaacccgtaaactcgcccagaagctaggtgtagagcagcctacattgtattggcatgtaaaaaataagcgagctctgctagacgctatggccattgagatgatggataggcacaagacccactactgtcctttggaaggggaaagctggcaagacttcttgaggaacaaggctaagtccaggagaaatgctttgctcagtcaccgtgatggagccaaggtctgcctaggtacgggcttcacggagcaacagtatgaaactgctgagaactggcttgccttcctgacacaacaaggtttctcccttgagaacgccctctacgcaatgcaagctgttgggatctacactctgggttgcgtcttgctggatcaagagctgcaagtcgctaaggaggagagggaaacacctactactgatagtatgccgccactggttcgacaagcttacgaactcaaagatcaccaaggtgcagagccagccttcctgttcggccttgaactgatcataagtggattggagaagcagctgaagtgtgaaagtgggtct

SEQ ID NO: 1262 - DNA, 624 bp, Artificial Sequence
  Nucleotides encoding Sulfonylurea responsive repressor
atgggatctagattagataaaagtaaagtgattaacagcgcattagagctgcttaatgaggtcggaatcgaaggtttaacaacccgtaaactcgcccagaagctaggtgtagagcagcctacattgtattggcatgtaaaaaataagcgagctctgctagacgctatggccattgagatgttggataggcacgacacccactacctgcctttggaaggggaaagctggcaagacttcttgaggaacaatgctaagtccaggagaaatgctttgctcagtcaccgtgatggagccaaggtcgctctaggtacgggcttcacggagcaacagtatgaaactatggagaactcgcttgccttcctgacacaacaaggtttctcccttgagaacgccctctacgcaatgcaagctgttgggatctacactctgggttgcgtcttgctggatcaagagctgcaagtcgctaaggaggagagggaaacacctactactgatagtatgccgccactggttcgacaagcttacgaactcaaagatcaccaaggtgcagagccagccttcctgttcggccttgaactgatcatatgtggattggagaagcagctgaaggcagaaagtgggtct

SEQ ID NO: 1263 - DNA, 624 bp, Artificial Sequence
  Nucleotides encoding Sulfonylurea responsive repressor
atgggatctagattagataaaagtaaagtgattaacagcgcattagagctgcttaatgaggtcggaatcgaaggtttaacaacccgtaaactcgcccagaagctaggtgtagagcagcctacattgtattggcatgtaaaaaataagcgagctctgctagacgctatggccattgagatgttggataggcacgccacccactactgtcctttggaaggggaaagctggcaagacttcttgaggaacaaggctaagtccaggagaaatgctttgctcagtcaccgtgatggagccaaggtcgctctaggtacgggcttcacggagcaacagtatgaaactatggagaacagtcttgccttcctgacacaacaaggtttctcccttgagaacgccctctacgcaatgcaagctgttgggatctacactctgggttgcgtcttgctggatcaagagctgcaagtcgctaaggaggagagggaaacacctactactgatagtatgccgccactggttcgacaagcttacgaactcaaagatcaccaaggtgcagagccagccttcctgttcggccttgaactgatcatatgtggattggagaagcagctgaagtgtgaaagtgggtct

SEQ ID NO: 1264 - DNA, 624 bp, Artificial Sequence
  Nucleotides encoding Sulfonylurea responsive repressor
atgggatctagattagataaaagtaaagtgattaacagcgcattagagctgcttaatgaggtcggaatcgaaggtttaacaacccgtaaactcgcccagaagctaggtgtagagcagcctacattgtattggcatgtaaaaaataagcgagctctgctagacgctatggccattgagatgttggataggcacgccacccactacctgcctttggaaggggaaagctggcaagacttcttgaggaacaatgctaagtccaggagaaatgctttgctcagtcaccgtgatggagccaaggtctgcctaggtacgggcttcacggagcaacagtatgaaactatggagaactctcttgccttcctgacacaacaaggtttctcccttgagaacgccctctacgcaatgcaagctgttgggatctacactctgggttgcgtcttgctggatcaagagctgcaagtcgctaaggaggagagggaaacacctactactgatagtatgccgccactggttcgacaagcttacgaactcaaagatcaccaaggtgcagagccagccttcctgttcggccttgaactgatcatatgtggattggagaagcagctgaagtgtgaaagtgggtct

SEQ ID NO: 1265 - DNA, 624 bp, Artificial Sequence
  Nucleotides encoding Sulfonylurea responsive repressor
atgggatctagattagataaaagtaaagtgattaacagcgcattagagctgcttaatgaggtcggaatcgaaggtttaacaacccgtaaactcgcccagaagctaggtgtagagcagcctacattgtattggcatgtaaaaaataagcgagctctgctagacgctatggccattgagatgttggataggcacgccacccactactgtcctttggaaggggaaagctggcaagacttcttgaggaacaaggctaagtccaggagaaatgctttgctcagtcaccgtgatggagccaaggtcgctctaggtacgggcttcacggagcaacagtatgaaactatggagaactcgcttgccttcctgacacaacaaggtttctccattgagaacgccctctacgcaatgcaagctgttgggatctacactctgggttgcgtcttgctggatcaagagctgcaagtcgctaaggaggagagggaaacacctactactgatagtatgccgccactggttcgacaagcttacgaactcagagatcaccaaggtgcagagccagccttcctgttcggccttgaactgatcatatgtggattggagaagcagctgaagtgtgaaagtgggtct

SEQ ID NO: 1266 - DNA, 624 bp, Artificial Sequence
  Nucleotides encoding Sulfonylurea responsive repressor
atgggatctagattagataaaagtaaagtgattaacagcgcattagagctgcttaatgaggtcggaatcgaaggtttaacaacccgtaaactcgcccagaagctaggtgtagagcagcctacattgtattggcatgtaaaaaataagcgagctctgctagacgctatggccattgagatgttggataggcacgccacccactacctgcctttggaaggggaaagctggcaagacttcttgaggaacagggctaagtccatgagaaatgctttgctcagtcaccgtgatggagccaaggtcgctctaggtacgggcttcacggagcaacagtatgaaactatggagaactgtcttgccttcctgacacaacaaggtttctcccttgagaacgccctctacgcatttcaagctgttgggatctacactctgggttgcgtcttgctggatcaagagctgcaagtcgctaaggaggagagggaaacacctactactgatagtatgccgccactggttcgacaagcttacgaactcaaagatcaccaaggtgcagagccagccttcctgttcggccttgaactgatcataagtggattggagaagcagctgaaggcagaaagtgggtct

SEQ ID NO: 1267 - DNA, 621 bp, Artificial Sequence
  Nucleotides encoding Sulfonylurea responsive repressor
atgggatctagattagataaaagtaaagtgattaacagcgcattagagctgcttaatgaggtcggaatcgaaggtttaacaacccgtaaactcgcccagaagctaggtgtagagcagcctacattgtattggcatgtaaaaaataagcgagctctgctagacgctatggccattgagatgttggataggcacgacacccactactgtcctttggaaggggaaagctggcaagacttcttgaggaacaaggctaagtccatgagaaatgctttgctcagtcaccgtgatggagccaaggtctgcctaggtacgggcttcacggagcaacagtatgaaactgctgagaactcgcttgccttcctgacacaacaaggtttctcccttgagaacgccctctacgcaggtcaagctgttgggatctacactctgggttgcgtcttgctggatcaagagctgcaagtcgctaaggaggagagggaaacacctactactgatagtatgccgccactggttcgacaagctctcgaactccacgatcaccaaggtgcagagccagccttcctgttcggccttgaactgatcataagtggattggagaagcactgaaggcagaaatgggtt

SEQ ID NO: 1268 - DNA, 624 bp, Artificial Sequence
  Nucleotides encoding Sulfonylurea responsive repressor
atgggatctagattagataaaagtaaagtgattaacagcgcattagagctgcttaatgaggtcggaatcgaaggtttaacaacccgtaaactcgcccagaagctaggtgtagagcagcctacattgtattggcatgtaaaaaataagcgagctctgctagacgctatggccattgagatgttggataggcacgccacccactactgtcctttggaaggggaaagctggcaagacttcttgaggaacaaggctaagtccatgagaaatgctttgctcagtcaccgtgatggagccaaggtcgctctaggtacgggcttcacggagcaacagtatgaaactatggagaactctcttgccttcctgacacaacaaggtttctcccttgagaacgccctctacgcatttcaagctgttgggatctacactctgggttgcgtcttgctggatcaagagctgcaagtcgctaaggaggagagggaaacacctactactgatagtatgccgccactggttcgacaagcttacgaactcaaagatcaccaaggtgcagagccagccttcctgttcggccttgaactgatcataagtggattggagaagcagctgaaggcagaaagtgggtct

SEQ ID NO: 1269 - DNA, 624 bp, Artificial Sequence
  Nucleotides encoding Sulfonylurea responsive repressor
atgggatctagattagataaaagtaaagtgattaacagcgcattagagctgcttaatgaggtcggaatcgaaggtttaacaacccgtaaactcgcccagaagctaggtgtagagcagcctacattgtattggcatgtaaaaaataagcgagctctgctagacgctatggccattgagatgttcgataggcacaagacccactactgtcctttggaaggggaaagctggcaagacttcttgaggaacaatgctaagtccaggagaaatgctttgctcagtcaccgtgatggagccaaggtcgctctaggtacgggcttcacggagcaacagtatgaaactgctgagaactgtcttgccttcctgacacaacaaggtttctcccttgagaacgccctctacgcaatgcaagctgttgggatctacactctgggttgcgtcttgctggatcaagagctgcaagtcgctaaggaggagagggaaacacctactactgatagtatgccgccactggttcgacaagcttacgaactcaaagatcaccaaggtgcagagccagccttcctgttcggccttgaactgatcatatgtggattggagaagcagctgaaggcagaaagtgggtct

SEQ ID NO: 1270 - DNA, 624 bp, Artificial Sequence
  Nucleotides encoding Sulfonylurea responsive repressor
atgggatctagattagataaaagtaaagtgattaacagcgcattagagctgcttaatgaggtcggaatcgaaggtttaacaacccgtaaactcgcccagaagctaggtgtagagcagcctacattgtattggcatgtaaaaaataagcgagctctgctagacgctatggccattgatatgttggataggcacaagacccactactgtcctttggaaggggaaagctggcaagacttcttgaggaacagggctaagtccatgagaaatgctttgctcagtcaccgtgatggagccaaggtcgctctaggtacgggcttcacggagcaacagtatgaaactatggagaactgtcttgccttcctgacacaacaaggtttctcccttgagaacgccctctacgcaatgcaagctgttgggatctacactctgggttgcgtcttgctggatcaagagctgcaagtcgctaaggaggagagggaaacacctactactgatagtatgccgccactggttcgacaagcttacgaactcagagatcaccaaggtgcagagccagccttcctgttcggccttgaactgatcataagtggattggagaagcagctgaaggcagaaagtgggtct

SEQ ID NO: 1271 - DNA, 624 bp, Artificial Sequence
  Nucleotides encoding Sulfonylurea responsive repressor
atgggatctagattagataaaagtaaagtgattaacagcgcattagagctgcttaatgaggtcggaatcgaaggtttaacaacccgtaaactcgcccagaagctaggtgtagagcagcctacattgtattggcatgtaaaaaataagcgagctctgctagacgctatggccattgagatgttggataggcacgccacccactacctgcctttggaaggggaaagctggcaagacttcttgaggaacagggctaagtccatgagaaatgctttgctcagtcaccgtgatggagccaaggtcgctctaggtacgggcttcacggagcaacagtatgaaactgctgagaactcgcttgccttcctgacacaacaaggtttctcccttgagaacgccctctacgcatttcaagctgttgggatctacactctgggttgcgtcttgctggatcaagagctgcaagtcgctaaggaggagagggaaacacctactactgatagtatgccaccactggttcgacaagctctcgaactccacgatcaccaaggtgcagagccagccttcctgttcggccttgaactgatcatatgtggattggagaagcagctgaaggcagaaagtgggtct

SEQ ID NO: 1272 - DNA, 624 bp, Artificial Sequence
  Nucleotides encoding Sulfonylurea responsive repressor
atgggatctagattagataaaagtaaagtgattaacagcgcattagagctgcttaatgaggtcggaatcgaaggtttaacaacccgtaaactcgcccagaagctaggtgtagagcagcctacattgtattggcatgtaaaaaataagcgagctctgctagacgctatggccattgagatgttcgataggcacgacacccactactgtcctttggaaggggaaagctggcaagacttcttgaggaacaaggctaagtccatgagaaatgctttgctcagtcaccgtgatggagccaaggtcgctctaggtacgggcttcacggagcaacagtatgaaactgctgagaactgtcttgccttcctgacacaacaaggtttctcccttgagaacgccctctacgcatttcaagctgttgggatctacactctgggttgcgtcttgctggatcaagagctgcaagtcgctaaggaggagagggaaacacctactactgatagtatgccgccactggttcgacaagctctcgaactccacgatcaccaaggtgcagagccagccttcctgttcggccttgaactgatcatatgtggattggagaagcagctgaagtgtgaaagtgggtct

SEQ ID NO: 1273 - DNA, 624 bp, Artificial Sequence
  Nucleotides encoding Sulfonylurea responsive repressor
atgggatctagattagataaaagtaaagtgattaacagcgcattagagctgcttaatgaggtcggaatcgaaggtttaacaacccgtaaactcgcccagaagctaggtgtagagcagcctacattgtattggcatgtaaaaaataagcgagctctgctagacgctatggccattgagatgttggataggcacaagacccactactgtcctttggaaggggaaagctggcaagacttcttgaggaacaaggctaagtccatgagaaatgctttgctcagtcaccgtgatggagccaaggtcgctctaggtacgggcttcacggagcaacagtatgaaactatggagaactcgcttgccttcctgacacaacaaggtttctcccttgagaacgccctctacgcaatgcaagctgttgggatctacactctgggttgcgtcttgctggatcaagagctgcaagtcgctaaggaggagagggaaacacctactactgatagtatgccgccactggttcgacaagcttacgaactcaaagatcaccaaggtgcagagccagccttcctgttcggccttgaactgatcataagtggattggagaagcagctgaagtgtgaaagtgggtct

SEQ ID NO: 1274 - DNA, 624 bp, Artificial Sequence
  Nucleotides encoding Sulfonylurea responsive repressor
atgggatctagattagataaaagtaaagtgattaacagcgcattagagctgcttaatgaggtcggaatcgaaggtttaacaacccgtaaactcgcccagaagctaggtgtagagcagcctacattgtattggcatgtaaaaaataagcgagctctgctagacgctatggccatagagatgttggataggcacgccacccactactgtcctttggaaggggaaagctggcaagacttcttgaggaacagggctaagtccatgagaaatgctttgctcagtcaccgtgatggagccaaggtcgctctaggtacgggcttcacggagcaacagtatgaaactatggagaactctcttgccttcctgacacaacaaggtttctcccttgagaacgccctctacgcatttcaagctgttgggatctacactctgggttgcgtcttgctggatcaagagctgcaagtcgctaaggaggagagggaaacacctactactgatagtatgccgccactggttcgacaagcttacgaactcaaagatcaccaaggtgcagagccagccttcctgttcggccttgaactgatcatatgtggattggagaagcagctgaagtgtgaaagtgggtct

SEQ ID NO: 1275 - DNA, 624 bp, Artificial Sequence
  Nucleotides encoding Sulfonylurea responsive repressor
atgggatctagattagataaaagtaaagtgattaacagcgcattagagctgcttaatgaggtcggaatcgaaggtttaacaacccgtaaactcgcccagaagctaggtgtagagcagcctacattgtattggcatgtaaaaaataagcgagctctgctagacgctatggccattgagatgttcgataggcacaagacccactacctgcctttggaaggggaaagctggcaagacttcttgaggaacagggctaagtccatgagaaatgctttgctcagtcaccgtgatggagccaaggtcgctctaggtacgggcttcacggagcaacagtatgaaactgctgagaactcgcttgccttcctgacacaacaaggtttctcccttgagaacgccctctacgcatttcaagctgttgggatctacactctgggttgcgtcttgctggatcaagagctgcaagtcgctaaggaggagagggaaacacctactactgatagtatgccgccactggttcgacaagctatcgaactccacgatcaccaaggtgcagagccagccttcctgttcggcctggaactgatcataagtggattggagaagcagctgaagtgtgaaagtgggtct

SEQ ID NO: 1276 - DNA, 624 bp, Artificial Sequence
  Nucleotides encoding Sulfonylurea responsive repressor
atgggatctagattagataaaagtaaagtgattaacagcgcattagagctgcttaatgaggtcggaatcgaaggtttaacaacccgtaaactcgcccagaagctaggtgtagagcagcctacattgtattggcatgtaaaaaataagcgagctctgctagacgctatggccattgagatgttcgataggcacgccatccactactgtcctttggaaggggaaagctggcaagacttcttgaggaacaatgctaagtccaggagaaatgctttgctccgtcaccgtgatggagccaaggtcgctctaggtacgggcttcacggagcaacagtatgaaactgctgagaactcgcttgccttcctgacacaacaaggtttctcccttgagaacgccctctacgcatttcaagctgttgggatctacactctgggttgcgtcttgctggatcaagagctgcaagtcgctaaggaggagagggaaacacctactactgatagtatgccgccactggttcgacaagcttacgaactcagagatcaccaaggtgcagagccagccttcctgttcggccttgaactgatcatatgtggattggagaagcagctgaagtgtgaaagtgggtct

SEQ ID NO: 1277 - DNA, 624 bp, Artificial Sequence
  Nucleotides encoding Sulfonylurea responsive repressor
atgggatctagattagataaaagtaaagtgattaacagcgcattagagctgcttaatgaggtcggaatcgaaggtttaacaacccgtaaactcgcccagaagctaggtgtagagcagcctacattgtattggcatgtaaaaaataagcgagctctgctagacgctatggccattgagatgttggataggcacaagacccactactgtcctttggaaggggaaagctggcaagacttcttgaggaacaaggctaagtccatgagaaatgctttgctcagtcaccgtgatggagccaaggtctgcctaggtacgggcttcacggagcaacagtatgaaactatggagaactcgcttgccttcctgacacaacaaggtttctcccttgagaacgccctctacgcaatgcaagctgttgggatctacactctgggttgcgtcttgctggatcaagagctgcaagtcgctaaggaggagagggaaacacctactactgatagtatgccgccactggttcgacaagcttacgaactcaaagatcaccaaggtgcagagccagccttcctgttcggccttgaactgatcatatgtggattggagaagcagctgaaggcagaaagtgggtct

SEQ ID NO: 1278 - DNA, 624 bp, Artificial Sequence
  Nucleotides encoding Sulfonylurea responsive repressor
atgggatctagattagataaaagtaaagtgattaacagcgcattagagctgcttaatgaggtcggaatcgaaggtttaacaacccgtaaactcgcccagaagctaggtgtagagcagcctacattgtattggcatgtaaaaaataagcgagctctgctagacgctatggccattgagatgttcgataggcacgacacccactacctgcctttggaagggaaaagctggcaagacttcttgaggaacagggctaagtccatgagaaatgctttgctcagtcaccgtgatggagccaaggtcgctctaggtacgggcttcacggagcaacagtatgaaactgctgagaactctcttgccttcctgacacaacaaggtttctcccttgagaacgccctctacgcatttcaagctgttgggatctacactctgggttgcgtcttgctggatcaagagctgcaagtcgctaaggaggagagggaaacacctactactgatagtatgccgccactggttcgacaagcttacgaactccacgatcaccaaggtgcagagccagccttcctgttcggccttgaactgatcataagtggattggagaagcagctgaagtgtgaaagtgggtct

SEQ ID NO: 1279 - DNA, 621 bp, Artificial Sequence
  Nucleotides encoding Sulfonylurea responsive repressor
atggccagactcgacaagagcaaggtgatcaacagcgcactggagctgctgaacgaggtcggaatcgaaggcctcacaacccgtaagctcgcccagaagctcggggttgagcagcctacattgtactggcacgtcaagaacaagcgagctctgctagacgctatggccattgagatgttggataggcacaagacccactactgtcctttggaaggggaaagctggcaagacttcttgaggaacaaggctaagtccatgagaaatgctttgctcagtcaccgtgatggagccaaggtcgctctaggtacgggcttcacggagcaacagtatgaaactgctgagaactctcttgccttcctgacacaacaaggtttctcccttgagaacgccctctacgcaggtcaagctgttgggatctacactctgggttgcgtcttgctggatcaagagctgcaagtcgctaaggaggagagggaaacacctactactgatagtatgccgccactggttcgacaagcttacgaactcagagatcaccaaggtgcagagccagccttcctgttcggccttgaactgatcataagtggattggagaagcagctgaaggcagaaagtgggtct

SEQ ID NO: 1280 - DNA, 621 bp, Artificial Sequence
  Nucleotides encoding Sulfonylurea responsive repressor
atggccagactcgacaagagcaaggtgatcaacagcgcactggagctgctgaacgaggtcggaatcgaaggcctcacaacccgtaagctcgcccagaagctcggggttgagcagcctacattgtactggcacgtcaagaacaagcgagctctgctagacgctatggccattgagatgttcgataggcacgccacccactacctgcctttggaaggggaaagctggcaagacttcttgaggaacaaggctaagtccatgagaaatgctttgctcagtcaccgtgatggagccaaggtcgctctaggtacgggcttcacggagcaacagtatgaaactatggagaactcgcttgccttcctgacacaacaaggtttctcccttgagaacgccctctacgcaatgcaagctgttgggatctacactctgggttgcgtcttgctggatcaagagctgcaagtcgctaaggaggagagggaaacacctactactgatagtatgccgccactggttcgacaagctatcgaactccacgatcaccaaggtgcagagccagccttcctgttcggccttgaactgatcataagtggattggagaagcagctgaaggcagaaagtgggtct

SEQ ID NO: 1281 - DNA, 621 bp, Artificial Sequence
  Nucleotides encoding Sulfonylurea responsive repressor
atggccagactcgacaagagcaaggtgatcaacagcgcactggagctgctgaacgaggtcggaatcgaaggcctcacaacccgtaagctcgcccagaagctcggggttgagcagcctacattgtactggcacgtcaagaacaagcgagctctgctagacgctatggccattgagatgttcgataggcacgccacccactacctgcctttggaaggggaaagctggcaagacttcttgaggaacaaggccaagtccatgagaaatgctttgctcagtcaccgtgatggagccaaggtcgctctaggtacgggcttcacggagcaacagtatgaaactatggagaactgtcttgccttcctgacacaacaaggtttctcccttgagaacgccctctacgcaatgcaagctgttgggatctacactctgggttgcgtcttgctggatcaagagctgcaagtcgctaaggaggagagggaaacacctactactgatagtatgccgccactggttcgacaagcttacgaactcaaagatcaccaaggtgcagagccagccttcctgttcggccttgaactgatcatatgtggattggagaagcagctgaaggcagaaagtgggtct

SEQ ID NO: 1282 - DNA, 621 bp, Artificial Sequence
  Nucleotides encoding Sulfonylurea responsive repressor
atggccagactcgacaagagcaaggtgatcaacagcgcactggagctgctgaacgaggtcggaatcgaaggcctcacaacccgtaagctcgcccagaagctcggggttgagcagcctacattgtactggcacgtcaagaacaagcgagctctgctagacgctatggccattgagatgttggataggcacaagacccactactgtcctttggaaggggaaagctggcaagacttcttgaggaacaaggctaagtccatgagaaatgctttgctcagtcaccgtgatggagccaaggtcgctctaggtacgggcttcacggagcaacagtatgaaactatggagaactgtcttgccttcctgacacaacaaggtttctcccttgagaacgccctctacgcaatgcaagctgttgggatctacactctgggttgcgtcttgctggatcaagagctgcaagtcgctaaggaggagagggaaacacctactactgatagtatgccgccactggttcgacaagcttacgaactcagagatcaccaaggtgcagagccagccttcctgttcggccttgaactgatcatatgtggattggagaagcagctgaagtgtgaaagtgggtct

SEQ ID NO: 1283 - DNA, 621 bp, Artificial Sequence
  Nucleotides encoding Sulfonylurea responsive repressor
atggccagactcgacaagagcaaggtgatcaacagcgcactggagctgctgaacgaggtcggaatcgaaggcctcacaacccgtaagctcgcccagaagctcggggttgagcagcctacattgtactggcacgtcaagaacaagcgagctctgcttgacgctatggccattgagatgttggataggcacgccacccactacctgcctttggaaggggaaagctggcaagacttcttgaggaacaaggctaagtccatgagaaatgctttgctcagtcaccgtgatggagccaaggtcgctctaggtacgggcttcacggagcaacagtatgaaactgctgagaactctcttgccttcctgacacaacaaggtttctcccttgagaacgccctctacgcatttcaagctgttgggatctacactctgggttgcgtcttgctggatcaagagctgcaagtcgctaaggaggagagggaaacacctactactgatagtatgccgccactggttcgacaagctatcgaactcagagatcaccaaggtgcagagccagccttcctgttcggccttgaactgatcataagtggattggagaagcagctgaagtgtgaaagtgggtct

SEQ ID NO: 1284 - DNA, 621 bp, Artificial Sequence
  Nucleotides encoding Sulfonylurea responsive repressor
atggccagactcgacaagagcaaggtgatcaacagcgcactggagctgctgaacgaggtcggaatcgaaggcctcacaacccgtaagctcgcccagaagctcggggttgagcagcctacattgtactggcacgtcaagaacaagcgagctctgctagacgctatggccattgagatgttcgataggcacgccacccactactgtcctttggaaggggaaagctggcaagacttcttgaggaacaaggctaagtccatgagaaatgctttgctcagacaccgtgatggagccaaggtcgctctaggtacgggcttcacggagcaacagtatgaaactgctgagaactgtcttgccttcctgacacaacaaggtttctcccttgagaacgccctctacgcatttcaagctgttgggatctacactctgggttgcgtcttgctggatcaagagctgcaagtcgctaaggaggagagggaaacacctactactgatagtatgccgccactggttcgacaagctatcgaactcaaagatcaccaaggtgcagagccagccttcctgttcggccttgaactgatcatatgtggattggagaagcagctgaagtgtgaaagtgggtct

SEQ ID NO: 1285 - DNA, 621 bp, Artificial Sequence
  Nucleotides encoding Sulfonylurea responsive repressor
atggccagactcgacaagagcaaggtgatcaacagcgcactggagctgctgaacgaggtcggaatcgaaggcctcacaacccgtaagctcgcccagaagctcggggttgagcagcctacattgtactggcacgtcaagaacaagcgagctctgctagacgctatggccattgagatgttcgataggcacaagacccactacctgcctttggaaggggaaagctggcaagacttcttgaggaacagggctaagtccatgagaaatgctttgctcagtcaccgtgatggagccaaggtcgctctaggtacgggcttcacggagcaacagtatgaaactatggagaactcgcttgccttcctgacacaacaaggtttctcccttgagaacgccctctacgcaatgcaagctgttgggatctacactctgggttgcgtcttgctggatcaagagctgcaagtcgctaaggaggagagggaaacacctactactgatagtatgccgccactggttcgacaagctatcgaactcaaagatcaccaaggtgcagagccagccttcctgttcggccttgaactgatcataagtggattggagaagcagctgaaggcagaaagtgggtct

SEQ ID NO: 1286 - DNA, 621 bp, Artificial Sequence
  Nucleotides encoding Sulfonylurea responsive repressor
atggccagactcgacaagagcaaggtgatcaacagcgcactggagctgctgaacgaggtcggaatcgaaggcctcacaacccgtaagctcgcccagaagctcggggttgagcagcctacattgtactggcacgtcaagaacaagcgagctctgctagacgctatggccattgagatgttcgataggcacgacacccactacctgcctttggaaggggaaagctggcaagacttcttgaggaacaaggctaagtccatgagaaatgctttgctcagtcaccgtgatggagccaaggtcgctctaggtacgggcttcacggagcaacagtatgaaactgctgagaactgtcttgccttcctgacacaacaaggtttctcccttgagaacgccctctacgcatttcaagctgttgggatctacactctgggttgcgtcttgctggatcaagagctgcaagtcgctaaggaggagagggaaacacctactactgatagtatgccgccactggttcgacaagcttacgaactcagagatcaccaaggtgcagagccagccttcctgttcggccttgaactgatcatatgtggattggagaagcagctgaagtgtgaaagtgggtct

SEQ ID NO: 1287 - DNA, 621 bp, Artificial Sequence
  Nucleotides encoding Sulfonylurea responsive repressor
atggccagactcgacaagagcaaggtgatcaacagcgcactggagctgctgaacgaggtcggaatcgaaggcctcacaacccgtaagctcgcccagaagctcggggttgagcagcctacattgtactggcacgtcaagaacaagcgagctctgctagacgctatggccattgagatgttcgataggcacgccacccactactgtcctttggaaggggaaagctggcaagacttcttgaggaacagggctaagtccatgagaaatgctttgctcagtcaccgtgatggagccaaggtctgcctaggtacgggcttcacggagcaacagtatgaaactatggagaactctcttgccttcctgacacaacaaggtttctcccttgagaacgccctctacgcaatgcaagctgttgggatctacactctgggttgcgtcttgctggatcaagagctgcaagtcgctaaggaggagagggaaacacctactactgatagtatgccgccactggttcgacaagctttcgaactcaaagatcaccaaggtgcagagccagccttcctgttcggccttgaactgatcatatgtggattggagaagcagctgaagtgtgaaagtgggtct

SEQ ID NO: 1288 - DNA, 621 bp, Artificial Sequence
  Nucleotides encoding Sulfonylurea responsive repressor
atggccagactcgacaagagcaaggtgatcaacagcgcactggagctgctgaacgaggtcggaatcgaaggcctcacaacccgtaagctcgcccagaagctcggggttgagcagcctacattgtactggcacgtcaagaacaagcgagctctgctagacgctatggccattgagatgttggataggcacgccacccactacctgcctttggaaggggaaagctggcaagacttcttgaggaacaaggctaagtccatgagaaatgctttgctcagtcaccgtgatggagccaaggtcgctctaggtacgggcttcacggagcaacagtatgaaactatggagaactcgcttgccttcctgacacaacaaggtttctcccttgagaacgccctctacgcaatgcaagctgttgggatctacactctgggttgcgtcttgctggatcaagagctgcaagtcgctaaggaggagagggaaacacctactactgatagtatgccgccactggttcgacaagcttacgaactcagagatcaccaaggtgcagagccagccttcctgttcggccttgaactgatcataagtggattggagaagcagctgaagtgtgaaagtgggtct

SEQ ID NO: 1289 - DNA, 621 bp, Artificial Sequence
  Nucleotides encoding Sulfonylurea responsive repressor
atggccagactcgacaagagcaaggtgatcaacagcgcactggagctgctgaacgaggtcggaatcgaaggcctcacaacccgtaagctcgcccagaagctcggggttgagcagcctacattgtactggcacgtcaagaacaagcgagctctgctagacgctatggccattgagatgttcgataggcacgccacccactactgtcctttggaaggggaaagctggcaagacttcttgaggaacaaggctaagtccatgagaaatgctttgctcagtcaccgtgatggagccaaggtcgctctaggtacgggcttcacggagcaacagtatgaaactgctgagaactgtcttgccttcctgacacaacaaggtttctcccttgagaacgccctctacgcatttcaagctgttgggatctacactctgggttgcgtcttgctggatcaagagctgcaagtcgctaaggaggagagggaaacacctactactgatagtatgccgccactggttcgacaagcttacgaactcaaagatcaccaaggtgcagagccagccttcctgttcggccttgaactgatcatatgtggattggagaagcagctgaagtgtgaaagtggatct

SEQ ID NO: 1290 - DNA, 621 bp, Artificial Sequence
  Nucleotides encoding Sulfonylurea responsive repressor
atggccagactcgacaagagcaaggtgatcaacagcgcactggagctgctgaacgaggtcggaatcgaaggcctcacaacccgtaagctcgcccagaagctcggggttgagcagcctacattgtactggcacgtcaagaacaagcgagctctgctagacgctatggccattgagatgttggataggcacaagacccactacctgcctttggaaggggaaagctggcaagacttcttgaggaacaatgctaagtccatgagaaatgctttgctcagtcaccgtgatggagccaaggtctgcctaggtacgggcttcacggagcaacagtatgaaactgctgagaactggcttgccttcctgacacaacaaggtttctcccttgagaacgccctctacgcatttcaagctgttgggatctacactctgggttgcgtcttgctggatcaagagctgcaagtcgctaaggaggagagggaaacacctactactgatagtatgccgccactggttcgacaagctctcgaactccacgatcaccaaggtgcagagccagccttcctgttcggccttgaactgatcataagtggattggagaagcagctgaaggcagaaagtgggtct

SEQ ID NO: 1291 - DNA, 621 bp, Artificial Sequence
  Nucleotides encoding Sulfonylurea responsive repressor
atggccagactcgacaagagcaaggtgatcaacagcgcactggagctgctgaacgaggtcggaatcgaaggcctcacaacccgtaagctcgcccagaagctcggggttgagcagcctacattgtactggcacgtcaagaacaagcgagctctgctagacgctatggccattgagatgttcgataggcacaagacccactactgtcctttggaaggggaaagctggcaagacttcttgaggaacagggctaagtccatgagaaatgctttgctcagtcaccgtgatggagccaaggtcgctctaggtacgggcttcacggagcaacagtatgaaactgctgagaactgtcttgccttcctgacacaacaaggtttctcccttgagaacgccctctacgcatttcaagctgttgggatctacactctgggttgcgtcttgctggatcaagagctgcaagtcgctaaggaggagagggaaacacctactactgatagtatgccgccactggttcgacaagctatcgaactccacgatcaccaaggtgcagagccagccttcctgttcggccttgaactgatcatatgtggattggagaagcagctgaagtgtgaaagtgggtct

SEQ ID NO: 1292 - DNA, 621 bp, Artificial Sequence
  Nucleotides encoding Sulfonylurea responsive repressor
atggccagactcgacaagagcaaggtgatcaacagcgcactggagctgctgaacgaggtcggaatcgaaggcctcacaacccgtaagctcgcccagaagctcggggttgagcagcctacattgtactggcacgtcaagaacaagcgagctctgctagacgctatggccattgagatgttcgataggcacgccacccactacctgcctttggaaggggaaagctggcaagacttcttgaggaacaatgctaagtccaggagaaatgctttgctcagtcaccgtgatggagccaaggtcgctctaggtacgggcttcacggagcaacagtatgaaactatggagaactctcttgccttcctgacacaacaaggtttctcccttgagaacgccctctacgcaatgcaagctgttgggatctacactctgggttgcgtcttgctggatcaagagctgcaagtcgctaaggaggagagggaaacacctactactgatagtatgccgccactggttcgacaagcttacgaactcagagatcaccaaggtgcagagccagccttcctgttcggccttgaactgatcatatgtggattggagaagcagctgaaggcagaaagtgggtct

SEQ ID NO: 1293 - DNA, 621 bp, Artificial Sequence
  Nucleotides encoding Sulfonylurea responsive repressor
atggccagactcgacaagagcaaggtgatcaacagcgcactggagctgctgaacgaggtcggaatcgaaggcctcacaacccgtaagctcgcccagaagctcggggttgagcagcctacattgtactggcacgtcaagaacaagcgagctctgctagacgctatggccattgagatgttggataggcacaagacccactactgtcctttggaaggggaaagctggcaagacttcttgaggaacaaggctaagtccatgagaaatgctttgctcagtcaccgtgatggagccaaggtcgctctaggtacgggcttcacggagcaacagtatgaaactatggagaactcgcttgccttcctgacacaacaaggtttctcccttgagaacgccctctacgcatttcaagctgttgggatctacactctgggttgcgtcttgctggatcaagagctgcaagtcgctaaggaggagagggaaacacctactactgatagtatgccgccactggttcgacaagcttacgaactcagagatcaccaaggtgcagagccagccttcctgttcggccttgaactgatcataagtggattggagaagcagctgaaggcagaaagtgggtct

SEQ ID NO: 1294 - DNA, 621 bp, Artificial Sequence
  Nucleotides encoding Sulfonylurea responsive repressor
atggccagactcgacaagagcaaggtgatcaacagcgcactggagctgctgaacgaggtcggaatcgaaggcctcacaacccgtaagctcgcccagaagctcggggttgagcagcctacattgtactggcacgtcaagaacaagcgagctctgctagacgctatggccattgagatgttggataggcacgccacccactactgtcctttggaaggggaaagctggcaagacttcttgaggaacaatgctaagtccatgagaaatgctttgctcagtcaccgtgatggagccaaggtcgctctaggtacgggcttcacggagcaacagtatgaaactatggagaactcgcttgccttcctgacacaacaaggtttctcccttgagaacgccctctacgcaatgcaagctgttgggatctacactctgggttgcgtcttgctggatcaagagctgcaagtcgctaaggaggagagggaaacacctactactgatagtatgccgccactggttcgacaagcttacgaactcagagatcaccaaggtgcagagccagccttcctgttcggccttgaactgatcataagtggattggagaagcagctgaagtgtgaaagtgggtct

SEQ ID NO: 1295 - DNA, 621 bp, Artificial Sequence
  Nucleotides encoding Sulfonylurea responsive repressor
atggccagactcgacaagagcaaggtgatcaacagcgcactggagctgctgaacgaggtcggaatcgaaggcctcacaacccgtaagctcgcccagaagctcggggttgagcagcctacattgtactggcacgtcaagaacaagcgagctctgctagacgctatggccattgagatgttcgataggcacaagacccactactgtcctttggaaggggaaagctggcaagacttcttgaggaacagggctaagtccatgagaaatgctttgctcagtcaccgtgatggagccaaggtcgctctaggtacgggcttcacggagcaacagtatgaaactatggagaactgtcttgccttcctgacacaacaaggtttctcccttgagaacgccctctacgcaatgcaagctgttgggatctacactctgggttgcgtcttgctggatcaagagctgcaagtcgctaaggaggagagggaaacacctactactgatagtatgccgccactggttcgacaagcttacgaactcagagatcaccaaggtgcagagccagccttcctgttcggccttgaactgatcatatgtggattggagaagcagctgaagtgtgaaagtgggtct

SEQ ID NO: 1296 - DNA, 621 bp, Artificial Sequence
  Nucleotides encoding Sulfonylurea responsive repressor
atggccagactcgacaagagcaaggtgatcaacagcgcactggagctgctgaacgaggtcggaatcgaaggcctcacaacccgtaagctcgcccagaagctcggggttgagcagcctacattgtactggcacgtcaagaacaagcgagctctgctagacgctatggccattgagatgttggataggcacgacacccactactgtcctttggaaggggaaagctggcaagacttcttgaggaacaaggctaagtccatgagaaatgctttgctcagtcaccgtgatggagccaaggtcgctctaggtacgggcttcacggagcaacagtatgaaactatggagaactgtcttgccttcctgacacaacaaggtttctcccttgagaacgccctctacgcaatgcaagctgttgggatctacactctgggttgcgtcttgctggatcaagagctgcaagtcgctaaggaggagagggaaacacctactactgatagtatgccgccactggttcgacaagcttacgaactcagagatcaccaaggtgcagagccagccttcctgttcggccttgaactgatcataagtggattggagaagcagctgaaggcagaaagtgggtct

SEQ ID NO: 1297 - DNA, 621 bp, Artificial Sequence
  Nucleotides encoding Sulfonylurea responsive repressor
atggccagactcgacaagagcaaggtgatcaacagcgcactggagctgctgaacgaggtcggaatcgaaggcctcacaacccgtaagctcgcccagaagctcggggttgagcagcctacattgtactggcacgtcaagaacaagcgagctctgctagacgctatggccattgagatgttggataggcacgacacccactacctgcctttggaaggggaaagctggcaagacttcttgaggaacaaggctaagtccatgagaaatgctttgctcagtcaccgtgatggagccaaggtcgctctaggtacgggcttcacggagcaacagtatgaaactatggagaactgtcttgccttcctgacacaacaaggtttctcccttgagaacgccctctacgcatttcaagctgttgggatctacactctgggttgcgtcttgctggatcaagagctgcaagtcgctaaggaggagagggaaacacctactactgatagtatgccgccactggttcgacaagcttacgaactcagagatcaccaaggtgcagagccagccttcctgttcggccttgaactgatcataagtggattggagaagcagctgaagtgtgaaagtgggtct

SEQ ID NO: 1298 - DNA, 621 bp, Artificial Sequence
  Nucleotides encoding Sulfonylurea responsive repressor
atggccagactcgacaagagcaaggtgatcaacagcgcactggagctgctgaacgaggtcggaatcgaaggcctcacaacccgtaagctcgcccagaagctcggggttgagcagcctacattgtactggcacgtcaagaacaagcgagctctgctagacgctatggccattgagatgttcgataggcacaagacccactacctgcctttggaaggggaaagctggcaagacttcttgaggaacagggctaagtccatgagaaatgctttgctcagtcaccgtgatggagccaaggtcgctctaggtacgggcttcacggagcaacagtatgaaactgctgagaactcgcttgccttcctgacacaacaaggtttctcccttgagaacgccctctacgcatttcaagctgttgggatctacactctgggttgcgtcttgctggatcaagagctgcaagtcgctaaggaggagagggaaacacctactactgatagtatgccgccactggttcgacaagcttacgaactcaaagatcacaaaggtgcagagccagccttcctgttcggccttgaactgatcatatgtggattggagaagcagctgaaggcagaaagtgggtct

SEQ ID NO: 1299 - DNA, 621 bp, Artificial Sequence
  Nucleotides encoding Sulfonylurea responsive repressor
atggccagactcgacaagagcaaggtgatcaacagcgcactggagctgctgaacgaggtcggaatcgaaggcctcacaacccgtaagctcgcccagaagctcggggttgagcagcctacattgtactggcacgtcaagaacaagcgagctctgctagacgctatggccattgagatgttggataggcacgccacccactactgtcctttggaaggggaaagctggcaagacttcttgaggaacaaggctaagtccatgagaaatgctttgctcagtcaccgtgatggagccaaggtcgctctaggtacgggcttcacggagcaacagtatgaaactgctgagaactgtcttgccttcctgacacaacaaggtttctcccttgagaacgccctctacgcatttcaagctgttgggatctacactctgggttgcgtcttgctggatcaagagctgcaagtcgctaaggaggagagggaaacacctactactgatagtatgccgccactggttcgacaagcttacgaactcagagatcaccaaggtgcagagccagccttcctgttcggccttgaactgatcatatgtggattggagaagcagctgaaggcagaaagtgggtct

SEQ ID NO: 1300 - DNA, 621 bp, Artificial Sequence
  Nucleotides encoding Sulfonylurea responsive repressor
atggccagactcgacaagagcaaggtgatcaacagcgcactggagctgctgaacgaggtcggaatcgaaggcctcacaacccgtaagctcgcccagaagctcggggttgagcagcctacattgtactggcacgtcaagaacaagcgagctctgctagacgctatggccattgagatgttcgataggcacgccacccactactgtcctttggaaggggaaagctggcaagacttcttgaggaacaaggctaagtccatgagaaatgctttgctcagtcaccgtgatggagccaaggtcgctctaggtacgggcttcacggagcaacagtatgaaactgctgagaactctcttgccttcctgacacaacaaggtttctcccttgagaacgccctctacgcaggtcaagctgttgggatctacactctgggttgcgtcttgctggatcaagagctgcaagtcgctaaggaggagagggaaacacctactactgatagtatgccgccactggttcgacaagcttacgaactcaaagatcaccaaggtgcagagccagccttcctgttcggccttgaactgatcatatgtggattggagaagcagctgaagtgtgaaagtgggtct

SEQ ID NO: 1301 - DNA, 621 bp, Artificial Sequence
  Nucleotides encoding Sulfonylurea responsive repressor
atggccagactcgacaagagcaaggtgatcaacagcgcactggagctgctgaacgaggtcggaatcgaaggcctcacaacccgtaagctcgcccagaagctcggggttgagcagcctacattgtactggcacgtcaagaacaagcgagctctgctagacgctatggccattgagatgttcgataggcacgacacccactacctgcctttggaaggggaaagctggcaagacttcttgaggaacaaggctaagtccatgagaaatgctttgctcagtcaccgtgatggagccaaggtcgctctaggtacgggcttcacggagcaacagtatgaaactatggagaactcgcttgccttcctgacacaacaaggtttctcccttgagaacgccctctacgcaatgcaagctgttgggatctacactctgggttgcgtcttgctggatcaagagctgcaagtcgctaaggaggagagggaaacacctactactgatagtatgccgccactggttcgacaagcttacgaactcagagatcaccaaggtgcagagccagccttcctgttcggccttgaactgatcataagtggattggagaagcagctgaaggcagaaagtgggtct

SEQ ID NO: 1302 - DNA, 621 bp, Artificial Sequence
  Nucleotides encoding Sulfonylurea responsive repressor
atggccagactcgacaagagcaaggtgatcaacagcgcactggagctgctgaacgaggtcggaatcgaaggcctcacaacccgtaagctcgcccagaagctcggggttgagcagcctacattgtactggcacgtcaagaacaagcgagctctgctagacgctatggccattgagatgttcgataggcacaagacccactactgtcctttggaaggggaaagctggcaagacttcttgaggaacagggctaaggccaggagaaatgctttgctcagtcaccgtgatggagccaaggtcgctctaggtacgggcttcacggagcaacagtatgaaactgctgagaactggcttgccttcctgacacaacaaggtttctcccttgagaacgccctctacgcaatgcaagctgttgggatctacactctgggttgcgtcttgctggatcaagagctgcaagtcgctaaggaggagagggaaacacctactactgatagtatgccgccactggttcgacaagcttacgaactcagagatcaccaaggtgcagagccagccttcctgttcggccttgaactgatcataagtggattggagaagcagctgaagtgtgaaagtgggtct

SEQ ID NO: 1303 - DNA, 621 bp, Artificial Sequence
  Nucleotides encoding Sulfonylurea responsive repressor
atggccagactcgacaagagcaaggtgatcaacagcgcactggagctgctgaacgaggtcggaatcgaaggcctcacaacccgtaagctcgcccagaagctcggggttgagcagcctacattgtactggcacgtcaagaacaagcgagctctgctagacgctatggccattgagatgttggataggcacgccacccactactgtcctttggaaggggaaagctggcaagacttcttgaggaacagggctaagtccatgagaaatgctttgctcagtcaccgtgatggagccaaggtcgctctaggtacgggcttcacggagcaacagtatgaaactatggagaactgtcttgccttcctgacacaacaaggtttctcccttgagaacgccctctacgcaatgcaagctgttgggatctacactctgggttgcgtcttgctggatcaagagctgcaagtcgctaaggaggagagggaaacacctactactgatagtatgccgccactggttcgacaagcttacgaactcagagatcaccaaggtgcagagccagccttcctgttcggccttgaactgatcatatgtggattggagaagcagctgaagtgtgaaagtgggtct

SEQ ID NO: 1304 - DNA, 621 bp, Artificial Sequence
  Nucleotides encoding Sulfonylurea responsive repressor
atggccagactcgacaagagcaaggtgatcaacagcgcactggagctgctgaacgaggtcggaatcgaaggcctcacaacccgtaagctcgcccagaagctcggggttgagcagcctacattgtactggcacgtcaagaacaagcgagctctgctagacgctatggccattgagatgttcgataggcacgccacccactacctgcctttggaaggggaaagctggcaagacttcttgaggaacagggctaagtccatgagaaatgctttgctcagtcaccgtgatggagccaaggtcgctctaggtacgggcttcacggagcaacagtatgaaactgctgagaactgtcttgccttcctgacacaacaaggtttctcccttgagaacgccctctacgcatttcaagctgttgggatctacactctgggttgcgtcttgctggatcaagagctgcaagtcgctaaggaggagagggaaacacctactactgatagtatgccgccactggttcgacaagctttcgaactcagagatcaccaaggtgcagagccagccttcctgttcggccttgaactgatcatatgtggattggagaagcagctgaaggcagaaagtgggtct

SEQ ID NO: 1305 - DNA, 621 bp, Artificial Sequence
  Nucleotides encoding Sulfonylurea responsive repressor
atggccagactcgacaagagcaaggtgatcaacagcgcactggagctgctgaacgaggtcggaatcgaaggcctcacaacccgtaagctcgcccagaagctcggggttgagcagcctacattgtactggcacgtcaagaacaagcgagctctgctagacgctatggccattgagatgttggataggcacaagacccactacctgcctttggaaggggaaagctggcaagacttcttgaggaacaaggctaagtccatgagaaatgctttgctcagtcaccgtgatggagccaaggtcgctctaggtacgggcttcacggagcaacagtatgaaactatggagaactcgcttgccttcctgacacaacaaggtttctcccttgagaacgccctctacgcaatgcaagctgttgggatctacactctgggttgcgtcttgctggatcaagagctgcaagtcgctaaggaggagagggaaacacctactactgatagtatgccgccactggttcgacaagcttacgaactcagagatcaccaaggtgcagagccagccttcctgttcggccttgaactgatcataagtggattggagaagcagctgaagtgtgaaagtgggtct

SEQ ID NO: 1306 - DNA, 621 bp, Artificial Sequence
  Nucleotides encoding Sulfonylurea responsive repressor
atggccagactcgacaagagcaaggtgatcaacagcgcactggagctgctgaacgaggtcggaatcgaaggcctcacaacccgtaagctcgcccagaagctcggggttgagcagcctacattgtactggcacgtcaagaacaagcgagctctgctagacgctatggccattgagatgttggataggcacaagacccactactgtcctttggaaggggaaagctggcaagacttcttgaggaacagggctaagtccatgagaaatgctttgctcagtcaccgtgatggagccaaggtctgcctaggtacgggcttcacggagcaacagtatgaaactatggagaactcgcttgccttcctgacacaacaaggtttctcccttgagaacgccctctacgcatttcaagctgttgggatctacactctgggttgcgtcttgctggatcaagagctgcaagtcgctaaggaggagagggaaacacctactactgatagtatgccgccactggttcgacaagcttacgaactcagagatcaccaaggtgcagagccagccttcctgttcggccttgaactgatcataagtggattggagaagcagctgaaggcagaaagtgggtct

SEQ ID NO: 1307 - DNA, 619 bp, Artificial Sequence
  Nucleotides encoding Sulfonylurea responsive repressor
atggccagactcgacaagagcaaggtgatcaacagcgcactggagctgctgaacgaggtcggaatcgaaggcctcacaacccgtaagctcgcccagaagctcggggttgagcagcctacattgtactggcacgtcaagaacaagcgagctctgctagacgctatggccattgagatgttcgataggcacaagacccactacctgcctttggaaggggaaagctggcaagacttcttgaggaacagggctaagtccatgagaaatgctttgctcagtcaccgtgatggagccaaggtcgctctaggtacgggcttcacggagcaacagtatgaaactatggagaactcgcttgccttcctgacacaacaaggtttctcccttgagaacgccctctacgcaatgcaagctgttgggatctacactctgggttgcgtcttgctggatcaagagctgcaagtcgctaaggaggagagggaaacacctactactgatagtatgccgccactggttcgacaagctatcgaactccacgatcaccaaggtgcagagccagccttcctgttcggccttgaactgatcataagtggattggagaagcagcaagtgtgaaagtgggtct

SEQ ID NO: 1308 - DNA, 621 bp, Artificial Sequence
  Nucleotides encoding Sulfonylurea responsive repressor
atggccagactcgacaagagcaaggtgatcaacagcgcactggagctgctgaacgaggtcggaatcgaaggcctcacaacccgtaagctcgcccagaagctcggggttgagcagcctacattgtactggcacgtcaagaacaagcgagctctgctagacgctatggccattgagatgttggataggcacgccacccactactgtcctttggaaggggaaagctggcaagacttcttgaggaacaaggctaagtccatgagaaatgctttgctcagtcaccgtgatggagccaaggtcgctctaggtacgggcttcacggagcaacagtatgaaactatggagaactctcttgccttcctgacacaacaaggtttctcccttgagaacgccctctacgcaatgcaagctgttgggatctacactctgggttgcgtcttgctggatcaagagctgcaagtcgctaaggaggagagggaaacacctactactgatagtatgccgccactggttcgacaagcttacgaactcagagatcaccaaggtgcagagccagccttcctgttcggccttgaactgatcatatgtggattggagaagcagctgaagtgtgaaagtgggtct

SEQ ID NO: 1309 - DNA, 621 bp, Artificial Sequence; identical to SEQ ID NO: 822
  Nucleotides encoding Sulfonylurea responsive repressor

SEQ ID NO: 1310 - DNA, 621 bp, Artificial Sequence
  Nucleotides encoding Sulfonylurea responsive repressor
atggccagactcgacaagagcaaggtgatcaacagcgcactggagctgctgaacgaggtcggaatcgaaggcctcacaacccgtaagctcgcccagaagctcggggttgagcagcctacattgtactggcacgtcaagaacaagcgagctctgctagacgctatggccattgagatgttggataggcacaagacccactacctgcctttggaaggggaaagctggcaagacttcttgaggaacaaggctaagtccatgagaaatgctttgctcagtcaccgtgatggagccaaggtcgctctaggtacgggcttcacggagcaacagtatgaaactgctgagaactgtcttgccttcctgacacaacaaggtttctcccttgagaacgccctctacgcatttcaagctgttgggatctacactctgggttgcgtcttgctggatcaagagctgcaagtcgctaaggaggagagggaaacacctactactgatagtatgccgccactggttcgacaagctctcgaactcaaagatcaccaaggtgcagagccagccttcctgttcggccttgaactgatcataagtggattggagaagcagctgaagtgtgaaagtgggtct

SEQ ID NO: 1311 - DNA, 621 bp, Artificial Sequence
  Nucleotides encoding Sulfonylurea responsive repressor
atggccagactcgacaagagcaaggtgatcaacagcgcactggagctgctgaacgaggtcggaatcgaaggcctcacaacccgtaagctcgcccagaagctcggggttgagcagcctacattgtactggcacgtcaagaacaagcgagctctgctagacgctatggccattgagatgttcgataggcacgacacccactacctgcctttggaaggggaaagctggcaagacttcttgaggaacaaggctaagtccatgagaaatgctttgctcagtcaccgtgatggagccaaggtcgctctaggtacgggcttcacggagcaacagtatgaaactatggagaactctcttgccttcctgacacaacaaggtttctcccttgagaacgccctctacgcaatgcaagctgttgggatctacactctgggttgcgtcttgctggatcaagagctgcaagtcgctaaggaggagagggaaacacctactactgatagtatgccgccactggttcgacaagcttacgaactcagagatcacaaaggtgcagagccagccttcctgttcggccttgaactgatcatatgtggattggagaagcagctgaagtgtgaaagtgggtct

SEQ ID NO: 1312 - DNA, 621 bp, Artificial Sequence
  Nucleotides encoding Sulfonylurea responsive repressor
atggccagactcgacaagagcaaggtgatcaacagcgcactggagctgctgaacgaggtcggaatcgaaggcctcacaacccgtaagctcgcccagaagctcggggttgagcagcctacattgtactggcacgtcaagaacaagcgagctctgctagacgctatggccattgagatgttcgataggcacaagacccactactgtcctttggaaggggaaagctggcaagacttcttgaggaacagggctaagtccatgagaaatgctttgctcagtcaccgtgatggagccaaggtcgctctaggtacgggcttcacggagcaacagtatgaaactgctgagaactgtcttgccttcctgacacaacaaggtttctcccttgagaacgccctctacgcatttcaagctgttgggatctacactctgggttgcgtcttgctggatcaagagctgcaagtcgctaaggaggagagggaaacacctactactgatagtatgccgccactggttcgacaagctatcgaactccacgatcaccaaggtgcagagccagccttcctgttcggccttgaactgatcataagtggattggagaagcagctgaaggcagaaagtgggtct

SEQ ID NO: 1313 - DNA, 621 bp, Artificial Sequence
  Nucleotides encoding Sulfonylurea responsive repressor
atggccagactcgacaagagcaaggtgatcaacagcgcactggagctgctgaacgaggtcggaatcgaaggcctcacaacccgtaagctcgcccagaagctcggggttgagcagcctacattgtactggcacgtcaagaacaagcgagctctgctagacgctatggccattgagatgttcgataggcacaagacccactactgtcctttggaaggggaaagctggcaagacttcttgaggaacagggctaagtccatgagaaatgctttgctcagtcaccgtgatggagccaaggtcgctctaggtacgggcttcacggagcaacagtatgaaactatggagaactgtcttgccttcctgacacaacaaggtttctcccttgagaacgccctctacgcaatgcaagctgttgggatctacactctgggttgcgtcttgctggatcaagagctgcaagtcgctaaggaggagagggaaacacctactactgatagtatgccgccactggttcgacaagcttacgaactcagagatcaccaaggtgcagagccagccttcctgttcggccttgaactgatcataagtggattggagaagcagctgaagtgtgaaagtgggtct

SEQ ID NO: 1314 - DNA, 621 bp, Artificial Sequence
  Nucleotides encoding Sulfonylurea responsive repressor
atggccagactcgacaagagcaaggtgatcaacagcgcactggagctgctgaacgaggtcggaatcgaaggcctcacaacccgtaagctcgcccagaagctcggggttgagcagcctacattgtactggcacgtcaagaacaagcgagctctgctagacgctatggccattgagatgttcgataggcacaagacccactacctgcctttggaaggggaaagctggcaagacttcttgaggaacagggctaagtccatgagaaatgctttgctcagtcaccgtgatggagccaaggtcgctctaggtacgggcttcacggagcaacagtatgaaactatggagaactcgcttgccttcctgacacaacaaggtttctcccttgagaacgccctctacgcatttcaagctgttgggatctacactctgggttgcgtcttgctggatcaagagctgcaagtcgctaaggaggagagggaaacacctactactgatagtatgccgccactggttcgacaagcttacgaactcaaagatcaccaaggtgcagagccagccttcctgttcggccttgaactgatcatatgtggattggagaagcagctgaagtgtgaaagtgggtct

SEQ ID NO: 1315 - DNA, 621 bp, Artificial Sequence
  Nucleotides encoding Sulfonylurea responsive repressor
atggccagactcgacaagagcaaggtgatcaacagcgcactggagctgctgaacgaggtcggaatcgaaggcctcacaacccgtaagctcgcccagaagctcggggttgagcagcctacattgtactggcacgtcaagaacaagcgagctctgctagacgctatggccattgagatgttggataggcacaagacccactacctgcctttggaaggggaaagctggcaagacttcttgaggaacagggctaagtccatgagaaatgctttgctcagtcaccgtgatggagccaaggtctgcctaggtacgggcttcacggagcaacagtatgaaactatggagaactcgcttgccttcctgacacaacaaggtttctcccttgagaacgccctctacgcatttcaagctgttgggatctacactctgggttgcgtcttgctggatcaagagctgcaagtcgctaaggaggagagggaaacacctactactgatagtatgccgccactggttcgacaagcttacgaactcagagatcaccaaggtgcagagccagccttcctgttcggccttgaactgatcataagtggattggagaagcagctgaagtgtgaaagtgggtct

SEQ ID NO: 1316 - DNA, 621 bp, Artificial Sequence
  Nucleotides encoding Sulfonylurea responsive repressor
atggccagactcgacaagagcaaggtgatcaacagcgcactggagctgctgaacgaggtcggaatcgaaggcctcacaacccgtaagctcgcccagaagctcggggttgagcagcctacattgtactggcacgtcaagaacaagcgagctctgctagacgctatggccattgagatgttggataggcacaagacccactactgtcctttggaaggggaaagctggcaagacttcttgaggaacaaggctaagtccatgagaaatgctttgctcagtcaccgtgatggagccaaggtcgctctaggtacgggcttcacggagcaacagtatgaaactatggagaactctcttgccttcctgacacaacaaggtttctcccttgagaacgccctctacgcatttcaagctgttgggatctacactctgggttgcgtcttgctggatcaagagctgcaagtcgctaaggaggagagggaaacacctactactgatagtatgccgccactggttcgacaagcttacgaactcagagatcaccaaggtgcagagccagccttcctgttcggccttgaactgatcatatgtggattggagaagcagctgaagtgtgaaagtgggtct

SEQ ID NO: 1317 - DNA, 621 bp, Artificial Sequence
  Nucleotides encoding Sulfonylurea responsive repressor
atggccagactcgacaagagcaaggtgatcaacagcgcactggagctgctgaacgaggtcggaatcgaaggcctcacaacccgtaagctcgcccagaagctcggggttgagcagcctacattgtactggcacgtcaagaacaagcgagctctgctagacgctatggccattgagatgttggataggcacaagacccactacctgcctttggaaggggaaagctggcaagacttcttgaggaacaaggctaagtccatgagaaatgctttgctcagtcaccgtgatggagccaaggtcgctctaggtacgggcttcacggagcaacagtatgaaactatggagaactcgcttgccttcctgacacaacaaggtttctcccttgagaacgccctctacgcaatgcaagctgttgggatctacactctgggttgcgtcttgctggatcaagagctgcaagtcgctaaggaggagagggaaacacctactactgatagtatgccgccactggttcgacaagcttacgaactcagagatcaccaaggtgcagagccagccttcctgttcggccttgaactgatcatatgtggattggagaagcagctgaaggcagaaagtgggtct

SEQ ID NO: 1318 - DNA, 621 bp, Artificial Sequence
  Nucleotides encoding Sulfonylurea responsive repressor
atggccagactcgacaagagcaaggtgatcaacagcgcactggagctgctgaacgaggtcggaatcgaaggcctcacaacccgtaagctcgcccagaagctcggggttgagcagcctacattgtactggcacgtcaagaacaagcgagctctgctagacgctatggccattgagatgttggataggcacaagacccactacctgcctttggaaggggaaagctggcaagacttcttgaggaacagggctaagtccatgagaaatgctttgctcagtcaccgtgatggagccaaggtctgcctaggtacgggcttcacggagcaacagtatgaaactatggagaactgtcttgccttcctgacacaacaaggtttctcccttgagaacgccctctacgcatttcaagctgttgggatctacactctgggttgcgtcttgctggatcaagagctgcaagtcgctaaggaggagagggaaacacctactactgatagtatgccgtcactggttcgacaagcttacgaactcagagatcaccaaggtgcagagccagccttcctgttcggccttgaactgatcatatgtggattggagaagcagctgaagtgtgaaagtgggtct

SEQ ID NO: 1319 - DNA, 621 bp, Artificial Sequence
  Nucleotides encoding Sulfonylurea responsive repressor
atggccagactcgacaagagcaaggtgatcaacagcgcactggagctgctgaacgaggtcggaatcgaaggcctcacaacccgtaagctcgcccagaagctcggggttgagcagcctacattgtactggcacgtcaagaacaagcgagctctgctagacgctatggccattgagatgttcgataggcacgccacccactactgtcctttggaaggggaaagctggcaagacttcttgaggaacaatgctaagtccaggagaaatgctttgctcagtcaccgtgatggagccaaggtcgctctaggtacgggcttcacggagcaacagtatgaaactatggagaactctcttgccttcctgacacaacaaggtttctcccttgagaacgccctctacgcaatgcaagctgttgggatctacactctgggttgcgtcttgctggatcaagagctgcaagtcgctaaggaggagagggaaacacctactactgatagtatgccgccactggttcgacaagcttacgaactcagagatcaccaaggtgcagagccagccttcctgttcggccttgaactgatcataagtggattggagaagcagctgaagtgtgaaagtgggtct

SEQ ID NO: 1320 - DNA, 621 bp, Artificial Sequence
  Nucleotides encoding Sulfonylurea responsive repressor
atggccagactcgacaagagcaaggtgatcaacagcgcactggagctgctgaacgaggtcggaatcgaaggcctcacaacccgtaagctcgcccagaagctcggggttgagcagcctacattgtactggcacgtcaagaacaagcgagctctgctagacgctatggccattgagatgttcgataggcacaagacccactacctgcctttggaaggggaaagctggcaagacttcttgaggaacagggccaagtccatgagaaatgctttgctcagtcaccgtgatggagccaaggtcgctctaggtacgggcttcacggagcaacagtatgaaactatggagaactcgcttgccttcctgacacaacaaggtttctcccttgagaacgccctctacgcatttcaagctgttgggatctacactctgggttgcgtcttgctggatcaagagctgcaagtcgctaaggaggagagggaaacacctactactgatagtatgccgccactggttcgacaagcttacgaactcaaagatcaccaaggtgcagagccagccttcctgttcggccttgaactgatcatatgtggattggagaagcagctgaagtgtgaaagtgggtct

SEQ ID NO: 1321 - DNA, 620 bp, Artificial Sequence
  Nucleotides encoding Sulfonylurea responsive repressor
atggccagactcgacaagagcaaggtgatcaacagcgcactggagctgctgaacgaggtcggaatcgaaggcctcacaacccgtaagctcgcccagaagctcggggttgagcagcctacattgtactggcacgtcaagaacaagcgagctctgctagacgctatggccattgagatgttcgataggcacgacacccactacctgcctttggaaggggaaagctggcaagacttcttgaggaacaaggctaagtccatgagaaatgctttgctcagtcaccgtgatggagccaaggtcgctctaggtacgggcttcacggagcaacagtatgaaactgctgagaactgtcttgccttcctgacacaacaaggtttctcccttgagaacgccctctacgcatttcaagctgttgggatctacactctgggttgcgtcttgctggatcaagagctgcaagtcgctaaggaggagagggaaacacctactactgatagtatgccgccactggttcgacaagctttcgaactcaaagatcaccaaggtgcagagccagccttcctgttcggccttgaactgatcatatgtggattggagaagcagtgaaggcagaaagtgggttt

SEQ ID NO: 1322 - DNA, 621 bp, Artificial Sequence
  Nucleotides encoding Sulfonylurea responsive repressor
atggccagactcgacaagagcaaggtgatcaacagcgcactggagctgctgaacgaggtcggaatcgaaggcctcacaacccgtaagctcgcccagaagctcggggttgagcagcctacattgtactggcacgtcaagaacaagcgagctctgctagacgctatggccattgagatgttcgataggcacaagacccactactgtcctttggaaggggaaagctggcaagacttcttgaggaacaatgctaagtccatgagaaatgctttgctcagtcaccgtgatggagccaaggtcgctctaggtacgggcttcacggagcaacagtatgaaactatggagaactcgcttgccttcctgacacaacaaggtttctcccttgagaacgccctctacgcaatgcaagctgttgggatctacactctgggttgcgtcttgctggatcaagagctgcaagtcgctaaggaggagagggaaacacctactactgatagtatgccgccactggttcgacaagcttacgaactcaaagatcaccaaggtgcagagccagccttcctgttcggccttgaattgatcatatgtggattggagaagcagctgaaggcagaaagtgggtct

SEQ ID NO: 1323 - DNA, 621 bp, Artificial Sequence
  Nucleotides encoding Sulfonylurea responsive repressor
atggccagactcgacaagagcaaggtgatcaacagcgcactggagctgctgaacgaggtcggaatcgaaggcctcacaacccgtaagctcgcccagaagctcggggttgagcagcctacattgtactggcacgtcaagaacaagcgagctctgctagacgctatggccattgagatgttggataggcacaagacccactactgtcctttggaaggggaaagctggcaagacttcttgaggaacaaggctaagtccatgagaaatgctttgctcagtcaccgtgatggagccaaggtctgcctaggtacgggcttcacggagcaacagtatgaaactatggagaactcgcttgccttcctgacacaacaaggtttctcccttgagaacgccctctacgcaatgcaagctgttgggatctacactctgggttgcgtcttgctggatcaagagctgcaagtcgctaaggaggagagggaaacacctactactgatagtatgccgccactggttcgacaagcttacgaactcagagatcaccaaggtgcagagccagccttcctgttcggccttgaactgatcatatgtggattggagaagcagctgaagtgtgaaagtgggtct

SEQ ID NO: 1324 - DNA, 621 bp, Artificial Sequence
  Nucleotides encoding Sulfonylurea responsive repressor
atggccagactcgacaagagcaaggtgatcaacagcgcactggagctgctgaacgaggtcggaatcgaaggcctcacaacccgtaagctcgcccagaagctcggggttgagcagcctacattgtactggcacgtcaagaacaagcgagctctgctagacgctatggccattgagatgttggataggcacgacacccactactgtcctttggaaggggaaagctggcaagacttcttgaggaacaaggctaagtccatgagaaatgctttgctcagtcaccgtgatggagccaaggtcgctctaggtacgggcttcacggagcaacagtatgaaactatggagaactctcttgccttcctgacacaacaaggtttctcccttgagaacgccctctacgcatttcaagctgttgggatctacactctgggttgcgtcttgctggatcaagagctgcaagtcgctaaggaggagagggaaacacctactactgatagtatgccgccactggttcgacaagcttacgaactcagagatcaccaaggtgcagagccagccttcctgttcggccttgaactgatcataagtggattggagaagcagctgaagtgtgaaagtgggtct

SEQ ID NO: 1325 - DNA, 621 bp, Artificial Sequence
  Nucleotides encoding Sulfonylurea responsive repressor
atggccagactcgacaagagcaaggtgatcaacagcgcactggagctgctgaacgaggtcggaatcgaaggcctcacaacccgtaagctcgcccagaagctcggggttgagcagcctacattgtactggcacgtcaagaacaagcgagctctgctagacgctatggccattgagatgttggataggcacgccacccactacctgcctttggaaggggaaagctggcaagacttcttgaggaacaaggctaagtccatgagaaatgctttgctcagtcaccgtgatggagccaaggtctgcctaggtacgggcttcacggagcaacagtatgaaactatggagaactcgcttgccttcctgacacaacaaggtttctcccttgagaacgccctctacgcaatgcaagctgttgggatctacactctgggttgcgtcttgctggatcaagagctgcaagtcgctaaggaggagagggaaacacctactactgatagtatgccgccactggttcgacaagcttacgaactcagagatcaccaaggtgcagagccagccttcctgttcggccttgaactgatcataagtggattggagaagcagctgaagtgtgaaagtgggtct

SEQ ID NO: 1326 - DNA, 621 bp, Artificial Sequence
  Nucleotides encoding Sulfonylurea responsive repressor
atggccagactcgacaagagcaaggtgatcaacagcgcactggagctgctgaacgaggtcggaatcgaaggcctcacaacccgtaagctcgcccagaagctcggggttgagcagcctacattgtactggcacgtcaagaacaagcgagctctgctagacgctatggccattgagatgttcgataggcacgacacccactactgtcctttggaaggggaaagctggcaagacttcttgaggaacaaggctaagtccatgagaaatgctttgctcagtcaccgtgatggagccaaggtcgctctaggtacgggcttcacggagcaacagtatgaaactgctgagaactcgcttgccttcctgacacaacaaggtttctcccttgagaacgccctctacgcatttcaagctgttgggatctacactctgggttgcgtcttgctggatcaagagctgcaagtcgctaaggaggagagggaaacacctactactgatagtatgccgccactggttcgacaagctctcgaactccacgatcaccaaggtgcagagccagccttcctgttcggccttgaactgatcatatgtggattggagaagcagctgaagtgtgaaagtgggtct

SEQ ID NO: 1327 - DNA, 621 bp, Artificial Sequence
  Nucleotides encoding Sulfonylurea responsive repressor
atggccagactcgacaagagcaaggtgatcaacagcgcactggagctgctgaacgaggtcggaatcgaaggcctcacaacccgtaagctcgcccagaagctcggggttgagcagcctacattgtactggcacgtcaagaacaagcgagctctgctagacgctatggccattgagatgttcgataggcacgccacccactacctgcctttggaaggggaaagctggcaagacttcttgaggaacagggctaagtccatgagaaatgctttgctcagtcaccgtgatggagccaaggtctgcctaggtacgggcttcacggagcaacagtatgaaactgctgagaactgtcttgccttcctgacacaacaaggtttctcccttgagaacgccctctacgcatttcaagctgttgggatctacactctgggttgcgtcttgctggatcaagagctgcaagtcgctaaggaggagagggaaacacctactactgatagtatgccgccactggttcgacaagctctcgaactccacgatcaccaaggtgcagagccagccttcctgttcggccttgaactgatcatatgtggattggagaagcagctgaagtgtgaaagtgggtct

SEQ ID NO: 1328 - DNA, 621 bp, Artificial Sequence
  Nucleotides encoding Sulfonylurea responsive repressor
atggccagactcgacaagagcaaggtgatcaacagcgcactggagctgctgaacgaggtcggaatcgaaggcctcacaacccgtaagctcgcccagaagctcggggttgagcagcctacattgtactggcacgtcaagaacaagcgagctctgctagacgctatggccattgagatgttggataggcacgacacccactactgtcctttggaaggggaaacctggcaagacttcttgaggaacaaggctaagtccaggagaaatgctttgctcagtcaccgtgatggagccaaggtcgctctaggtacgggcttcacggagcaacagtatgaaactgctgagaactggcttgccttcctgacacaacaaggtttctcccttgagaacgccctctacgcaatgcaagctgttgggatctacactctgggttgcgtcttgctggatcaagagctgcaagtcgctaaggaggagagggaaacacctactactgatagtatgccgccactggttcgacaagcttacgaactcagagatcaccaaggtgcagagccagccttcctgttcggccttgaactgatcatatgtggattggagaagcagctgaagtgtgaaagtgggtct

SEQ ID NO: 1329 - DNA, 621 bp, Artificial Sequence
  Nucleotides encoding Sulfonylurea responsive repressor
atggccagactcgacaagagcaaggtgatcaacagcgcactggagctgctgaacgaggtcggaatcgaaggcctcacaacccgtaagctcgcccagaagctcggggttgagcagcctacattgtactggcacgtcaagaacaagcgagctctgctagacgctatggccattgagatgttggataggcacaagacccactacctgcctttggaaggggaaagctggcaagacttcttgaggaacagggctaagtccatgagaaatgctttgctcagtcaccgtgatggagccaaggtctgcctaggtacgggcttcacggagcaacagtatgaaactgctgagaactcgcttgccttcctgacacaacaaggtttctcccttgagaacgccctctacgcatttcaagctgttgggatctacactctgggttgcgtcttgctggatcaagagctgcaagtcgctaaggaggagagggaaacacctactactgatagtatgccgccactggttcgacaagctttcgaactcaaagatcaccaaggtgcagagccagccttcctgttcggccttgaactgatcatatgtggattggagaagcagctgaagtgtgaaagtgggtct

SEQ ID NO: 1330 - DNA, 621 bp, Artificial Sequence
  Nucleotides encoding Sulfonylurea responsive repressor
atggccagactcgacaagagcaaggtgatcaacagcgcactggagctgctgaacgaggtcggaatcgaaggcctcacaacccgtaagctcgcccagaagctcggggttgagcagcctacattgtactggcacgtcaagaacaagcgagctctgctagacgctatggccattgagatgttggataggcacaagacccactactgtcctttggaaggggaaagctggcaagacttcttgaggaacagggctaagtccatgagaaatgctttgctcagtcaccgtgatggagccaaggtctgcctaggtacgggcttcacggagcaacagtatgaaactgctgagaactctcttgccttcctgacacaacaaggtttctcccttgagaacgccctctacgcatttcaagctgttgggatctacactctgggttgcgtcttgctggatcaagagctgcaagtcgctaaggaggagagggaaacacctactactgatagtatgccgccactggttcgacaagctatcgaactcaaagatcaccaaggtgcagagccagccttcctgttcggccttgaactgatcatatgtggattggagaagcagctgaaggcagaaagtgggtct

SEQ ID NO: 1331 - DNA, 621 bp, Artificial Sequence
  Nucleotides encoding Sulfonylurea responsive repressor
atggccagactcgacaagagcaaggtgatcaacagcgcactggagctgctgaacgaggtcggaatcgaaggcctcacaacccgtaagctcgcccagaagctcggggttgagcagcctacattgtactggcacgtcaagaacaagcgagctctgctagacgctatggccattgagatgttggataggcacaagacccactactgtcctttggaaggggaaagctggcaagacttcttgaggaacaaggctaagtccatgagaaatgctttgctcagtcaccgtgatggagccaaggtcgctctaggtacgggcttcacggagcaacagtatgaaactatggagaactctcttgccttcctgacacaacaaggtttctcccttgagaacgccctctacgcaatgcaagctgttgggatctacactctgggttgcgtcttgctggatcaagagctgcaagtcgctaaggaggagagggaaacacctactactgatagtatgccgccactggttcgacaagctttcgaactcaaagatcaccaaggtgcagagccagccttcctgttcggccttgaactgatcatatgtggattggagaagcagctgaagtgtgaaagtgggtct

SEQ ID NO: 1332 - DNA, 621 bp, Artificial Sequence
  Nucleotides encoding Sulfonylurea responsive repressor
atggccagactcgacaagagcaaggtgatcaacagcgcactggagctgctgaacgaggtcggaatcgaaggcctcacaacccgtaagctcgcccagaagctcggggttgagcagcctacattgtactggcacgtcaagaacaagcgagctctgctagacgctatggccattgagatgttcgataggcacgccacccactacctgcctttggaaggggaaagctggcaagacttcttgaggaacagggctaagtccatgagaaatgctttgctcagtcaccgtgatggagccaaggtcgctctaggtacgggcttcacggagcaacagtatgaaactatggagaactctcttgccttcctgacacaacaaggtttctcccttgagaacgccctctacgcaatgcaagctgttgggatctacactctgggttgcgtcttgctggatcaagagctgcaagtcgctaaggaggagagggaaacacctactactgatagtatgccgccactggttcgacaagctttcgaactcaaagatcaccaaggtgcagagccagccttcctgttcggccttgaactgatcataagtggattggagaagcagctgaaggcagaaagtgggtct

SEQ ID NO: 1333 - DNA, 621 bp, Artificial Sequence
  Nucleotides encoding Sulfonylurea responsive repressor
atggccagactcgacaagagcaaggtgatcaacagcgcactggagctgctgaacgaggtcggaatcgaaggcctcacaacccgtaagctcgcccagaagctcggggttgagcagcctacattgtactggcacgtcaagaacaagcgagctctgctagacgctatggccattgagatgttggataggcacaagacccactacctgcctttggaaggggaaagctggcaagacttcttgaggaacaaggctaagtccatgagaaacgctttgctcagtcaccgtgatggagccaaggtctgcctaggtacgggcttcacggagcaacagtatgaaactgctgagaactgtcttgccttcctgacacaacaaggtttctcccttgagaacgccctctacgcatttcaagctgttgggatctacactctgggttgcgtcttgctggatcaagagctgcaagtcgctaaggaggagagggaaacacctactactgatagtatgccgccactggttcgacaagctctcgaactcaaagatcaccaaggtgcagagccagccttcctgttcggccttgaactgatcataagtggattggagaagcagctgaaggcagaaagtgggtct

SEQ ID NO: 1334 - DNA, 621 bp, Artificial Sequence
  Nucleotides encoding Sulfonylurea responsive repressor
atggccagactcgacaagagcaaggtgatcaacagcgcactggagctgctgaacgaggtcggaatcgaaggcctcacaacccgtaagctcgcccagaagctcggggttgagcagcctacattgtactggcacgtcaagaacaagcgagctctgctagacgctatggccattgagatgttggataggcacaagacccactactgtcctttggaaggggaaagctggcaagacttcttgaggaacaatgctaagtccatgagaaatgctttgctcagtcaccgtgatggagccaaggtctgcctaggtacgggcttcacggagcaacagtatgaaactatggagaactcgcttgccttcctgacacaacaaggtttatcccttgagaacgccctctacgcaatgcaagctgttgggatctacactctgggttgcgtcttgctggatcaagagctgcaagtcgctaaggaggagagggaaacacctactactgatagtatgccgccactggttcgacaagcttacgaactcaaagatcaccaaggtgcagagccagccttcctgttcggccttgaactgatcatatgtggattggagaagcagctgaagtgtgaaagtgggtct

SEQ ID NO: 1335 - DNA, 621 bp, Artificial Sequence
  Nucleotides encoding Sulfonylurea responsive repressor
atggccagactcgacaagagcaaggtgatcaacagcgcactggagctgctgaacgaggtcggaatcgaaggcctcacaacccgtaagctcgcccagaagctcggggttgagcagcctacattgtactggcacgtcaagaacaagcgagctctgctagacgctatggccattgagatgttggataggcacaagacccactacctgcctttggaaggggaaagctggcaagacttcttgaggaacagggctaagtccatgagaaatgctttgctcagtcaccgtgatggagccaaggtcgctctaggtacgggcttcacggagcaacagtatgaaactatggagaactcgcttgccttcctgacacaacaaggtttctcccttgagaacgccctctacgcaatgcaagctgttgggatctacactctgggttgcgtcttgctggatcaagagctgcaagtcgctaaggaggagagggaaacacctactactgatagtatgccgccactggttcgacaagctttcgaactcagagatcaccaaggtgcagagccagccttcctgttcggccttgaactgatcataagtggattggagaagcagctgaaggcagaaagtgggtct

SEQ ID NO: 1336 - DNA, 621 bp, Artificial Sequence
  Nucleotides encoding Sulfonylurea responsive repressor
atggccagactcgacaagagcaaggtgatcaacagcgcactggagctgctgaacgaggtcggaatcgaaggcctcacaacccgtaagctcgcccagaagctcggggttgagcagcctacattgtactggcacgtcaagaacaagcgagctctgctagacgctatggccattgagatgttggataggcacaagacccactacctgcctttggaaggggaaagctggcaagacttcttgaggaacaaggctaagtccatgagaaatgctttgctcagtcaccgtgatggagccaaggtctgcctaggtacgggcttcacggagcaacagtatgaaactgctgagaactctcttgccttcctgacacaacaaggtttctcccttgagaacgccctctacgcatttcaagctgttgggatctacactctgggttgcgtcttgctggatcaagagctgcaagtcgctaaggaggagagggaaacacctactactgatagtatgccgccactggttcgacaagctttcgaactcaaagatcaccaaggtgcagagccagccttcctgttcggccttgaactgatcatatgtggattggagaagcagctgaagtgtgaaagtgggtct

SEQ ID NO: 1337 - DNA, 621 bp, Artificial Sequence
  Nucleotides encoding Sulfonylurea responsive repressor
atggccagactcgacaagagcaaggtgatcaacagcgcactggagctgctgaacgaggtcggaatcgaaggcctcacaacccgtaagctcgcccagaagctcggggttgagcagcctacattgtactggcacgtcaagaacaagcgagctctgctagacgctatggccatagagatgctcgatcggcaccaagttcacaacttacccttggaaggggaaagctggcaagatttcttgaggaactgggctaagtccatgagaaatgctttgctcagtcaccgtgatggagccaaggtctgtctaggtacgggcttcacggagcgacaatatgaaacttctgagaacaagcttgccttcctgacacaacaaggtttctcccttgagaacgccctctacgccttccaagcagtggggatctacactctgggttgtgtcttgctggatcaagagctgcaagtcgctaaggaggagagggaaacacctactactgatagtatgccgccactggttcgacaagctattgaactcgcggatcaccaaggtgcagagccagccttcctgttcggccttgaactgatcatatcaggattggagaagcagctgaaggccgaaagtgggtct

SEQ ID NO: 1338 - DNA, 621 bp, Artificial Sequence
  Nucleotides encoding Sulfonylurea responsive repressor
atggccagactcgacaagagcaaggtgatcaacagcgcactggagctgctgaacgaggtcggaatcgaaggcctcacaacccgtaagctcgcccagaagctcggggttgagcagcctacattgtactggcacgtcaagaacaagcgagctctgctagacgctatggccttagagatgctcgatcggcacaagactcactacttacccttggaaggggaaagctggcaaaatttcttgaggaactgggctaagtccatgagaaatgctttgctcagtcaccgtgatggagccaaggtctgtctaggtacgggcttcacggagcaacaatatgaaactatggagaactcgcttgccttcctgacacaacaaggtttctcccttgagaacgccctctacgcattccaagcagtggggatctacactctgggttgtgtcttgctggatcaagagctgcaagtcgctaaggaggagagggatacacctactactgatagtatgccgccactggttcgacaagctattgaactcgcggatcaccaaggtgcagagccagccttcctgttcggccttgaactgatcatatcaggattggagaagcagctgaaggccgaaagtgggtct

SEQ ID NO: 1339 - DNA, 621 bp, Artificial Sequence
  Nucleotides encoding Sulfonylurea responsive repressor
atggccagactcgacaagagcaaggtgatcaacagcgcactggagctgctgaacgaggtcggaatcgaaggcctcacaacccgtaagctcgcccagaagctcggggttgagcagcctacattgtactggcacgtcaagaacaagcgagctctgctagacgctatggccatagagatgctcgatcggcaccggactcactacttacccttggaaggggaaagctggcaaaatttcttgaggaacaaggctaagtccatgagaaatgctttgctcagtcaccgtgatggagccaaggtcgcactaggtacgggcttcacggagaaacaatatgaaactcaagagaactcgcttgccttcctgacacaacaaggtttctcccttgagaacgccctctacgcaaatcaagcagtggggatctacactctgggttgtgtcttgctggatcaagagctgcaggtcgctaaggaggagagggaaacacctactactgatagtatgccgccactggttcgacaagctattgaactcgcggatcaccaaggtgcagagccagccttcctgttcggccttgaagtgatcatatcaggattggagaagcagctgaaggccgaaagtgggtct

SEQ ID NO: 1340 - DNA, 621 bp, Artificial Sequence
  Nucleotides encoding Sulfonylurea responsive repressor
atggccagactcgacaagagcaaggtgatcaacagcgcactggagctgctgaacgaggtcggaatcgaaggcctcacaacccgtaagctcgcccagaagctcggggttgagcagcctacattgtactggcacgtcaagaacaagcgagctctgctagacgctatggccatagagatgctcgatcggcaccaaattcactacttacccttggaaggggaaagctggcaagatttcttgaggaactgggctaagtccatgagaaatgctttgctcagtcaccgtgatggagccaaggtctgtctaggtacgggcttcacggagcaacaatatgaaactgctgagaactcgcttgccttcctgacacaacaaggtttctcccttgagaacgccctctacgcattccaagcagtggggatctacactctgggttgtgtcttgctggatcaagagctgaaagtcgctaaggaggagagggaaacacctactactgatagtatgccgccactggttcgacaagcttttgaactcgcggatcaccaaggtgcagagccagccttcctgttcggccttgaacagatcatatcaggattggagaagcagctgaaggtcgaaagtgggtct

SEQ ID NO: 1341 - DNA, 621 bp, Artificial Sequence
  Nucleotides encoding Sulfonylurea responsive repressor
atggccagactcgacaagagcaaggtgatcaacagcgcactggagctgctgaacgaggtcggaatcgaaggcctcacaacccgtaagctcgcccagaagctcggggttgagcagcctacattgtactggcacgtcaagaacaagcgagctctgctagacgctatggccagagagatgctcgatcggcacacgattcactacctacccttggaaggggaaagctggcaaaatttcttgaggaacagggctaagtccatgagaaatgctttgctcagtcaccgtgatggagccaaggtctgtctaggtacgggcttcacggagcaacaatatgaaactatggagaactcgcttgccttcctgacacaacaaggtttctcccttgagaacgccctctacgcaatgcaagcagtggggatctacactctgggttgtgtcttgctggatcaagagctgcaagtcgctaaggaggagagggaaacacctactactgatagtatgccgccactggttcgacaagcttacgaactcgcggatcaccaaggtgcagagccagccttcctgttcggccttgaactgatcatatcaggattggagaagcagctgaaggccgaaagtgggtct

SEQ ID NO: 1342 - DNA, 621 bp, Artificial Sequence
  Nucleotides encoding Sulfonylurea responsive repressor
atggccagactcgacaagagcaaggtgatcaacagcgcactggagctgctgaacgaggtcggaatcgaaggcctcacaacccgtaagctcgcccagaagctcggggttgagcagcctacattgtactggcacgtcaagaacaagcgagctctgctagacgctatggccatagagatgctcgatcggcaccaaattcactacttacccttggaaggggaaagctggcaaaatttcttgaggaacagggctaagtccatgagaaatgctttgctcagtcaccgtgatggagccaaggtctgtctaggtacgggcttcacggagcaacaatatgaaactatggagaactcgcttgccttcctgacacaacaaggtttctcccttgagaacgccctctacgcattccaagcagtggggatctacactctgggttgtgtcttgctggatcaagagctgcaagtcgctaaggaggagagggaaacacctactactgatagtatgccgccactggttcgacaagctgttgaactcgcggatcaccaaggtgcagagccagccttcctgttcggccttgaactgatcatatcaggattggagaagcagctgaaggccgaaagtgggtct

SEQ ID NO: 1343 - DNA, 621 bp, Artificial Sequence
  Nucleotides encoding Sulfonylurea responsive repressor
atggccagactcgacaagagcaaggtgatcaacagcgcactggagctgctgaacgaggtcggaatcgaaggcctcacaacccgtaagctcgcccagaagctcggggttgagcagcctacattgtactggcacgtcaagaacaagcgagctctgctagacgctatggccatagagatgctcgatcggcacaggactcactacttacccttggaaggggaaagctggcaaaatttcttgaggaacaaggctaagtccatgagaaatgctttgctcagtcaccgtgatggagccaaggtctgtctaggtacgggcttcacggagagacaatatgaaactcaagagaactcgcttgccttcctgacacaacaaggtttctcccttgagaacgccctctacgcaaatcaagcagtggggatctacactctgggttgtgtcttgctggatcaagagctgcaagtcgctaaggaggagagggaaacacctactactgatagtatgccgccactggttcgacaagctattgaactcaatgatcaccaaggtgcagagccagccttcctgttcggccttgaactgatcatatcaggattggagaagcagctgaaggccgaaagtgggtct

SEQ ID NO: 1344 - DNA, 621 bp, Artificial Sequence
  Nucleotides encoding Sulfonylurea responsive repressor
atggccagactcgacaagagcaaggtgatcaacagcgcactggagctgctgaacgaggtcggaatcgaaggcctcacaacccgtaagctcgcccagaagctcggggttgagcagcctacattgtactggcacgtcaagaacaagcgagctctgctagacgctatggccatagagatgctcgatcggcacaggactcactacttacccttggaaggggaaagctggcaagatttcttgaggaactgggctaagtccatgagaaatgctttgctcagtcaccgtgatggagccaaggtcgcactaggtacgggcttcacggagcaacaatatgaaactatggagaactcgcttgccttcctgacacaacaaggtttctcccttgagaacgccctctacgcaaatcaagcagtggggatctacactctgggttgtgtcttgctggatcaagagctgcaagtcgctaaggaggagagggaaacacctactactgatagtttgccgccactggttcgacaagcttttgaactctccgatcaccaaggtgcagagccagccttcctgttcggccttgaactgatcatatcaggattggagaagcagctgaaggccgaaagtgggtct

SEQ ID NO: 1345 - DNA, 621 bp, Artificial Sequence
  Nucleotides encoding Sulfonylurea responsive repressor
atggccagactcgacaagagcaaggtgatcaacagcgcactggagctgctgaacgaggtcggaatcgaaggcctcacaacccgtaagctcgcccagaagctcggggttgagcagcctacattgtactggcacgtcaagaacaagcgagctctgctagacgctatggccatagagatgctcgatcggcacaggattcactacttacccttggaaggggaaagctggcaaaatttcttgaggaactgggctaagtccatgagaaatgctttgctcagtcaccgtgatggagccaaggtctgtctaggtacgggcttcacggagcaacaatatgaaacttctgagaactcgcttgccttcctgacacaacaaggtttctcccttgagaacgccctctacgcaatgcaagcagtggggatctacactctgggttgtgtcttgctggatcaagagctgcaagtcgctaaggaggagagggaaacacctacaactgatagtatgccgccactggttcgacaagctgttgaactcaatgatcaccaaggtgcagagccagccttcctgttcggccttgaacagatcatatcaggattggagaagcagctgaaggccgaaagtgggtct

SEQ ID NO: 1346 - DNA, 621 bp, Artificial Sequence
  Nucleotides encoding Sulfonylurea responsive repressor
atggccagactcgacaagagcaaggtgatcaacagcgcactggagctgctgaacgaggtcggaatcgaaggcctcacaacccgtaagctcgcccagaagctcggggttgagcagcctacattgtactggcacgtcaagaacaagcgagctctgctagacgctatggccatagagatgctcgatcggcaccaaattcactacttacccttggaaggggaaagctggcaagatttcttgaggaacaaggctaagtccatgagaaatgctttgctcagtcaccgtgatggagccaaggtctgtctaggtacgggcttcacggagcaacaatatgaaactgctgagaactcgcttgccttcctgacacaacaaggtttctcccttgagaacgccctctacgcaaatcaagcagtggggatctacactctgggttgtgtcttgctggatcaagagctgcaagtcgctaaggaggagagggaaacacctactactgatagtatgccgccactggttcgacaagctattgaactcaatgatcaccaaggtgcagagccagccttcctgttcggccttgaactgatcatatcaggattggagaagcagctgaaggccgaaagtgggtcc

SEQ ID NO: 1347 - DNA, 621 bp, Artificial Sequence
  Nucleotides encoding Sulfonylurea responsive repressor
atggccagactcgacaagagcaaggtgatcaacagcgcactggagctgctgaacgaggtcggaatcgaaggcctcacaacccgtaagctcgcccagaagctcggggttgagcagcctacattgtactggcacgtcaagaacaagcgagctctgctagacgctatggccgtagagatgctcgatcggcaccaaactcactacttacccttggaaggggaaagctggcaagatttcttgaggaactgggctaagtccatgagaaatgctttgctcagtcaccgtgatggagccaaggtctgtctaggtacgggcttcacggagcaacaatatgaaactatggagaactcgcttgccttcctgacccaacaaggtttctcccttgagaacgccctctacgcattccaagcagtggggatctacactctgggttgtgtcttgctggatcaagagctgcaagtcgctaaggaggagagggaaacacctactactgatagtatgccgccactggttcgacaagctgttgaactcgcggatcaccaaggtgcagagccagccttcctgttcggccttgaactgatcatatcaggattggagaagcagctgaaggccgaaagtgggtct

SEQ ID NO: 1348 - DNA, 621 bp, Artificial Sequence
  Nucleotides encoding Sulfonylurea responsive repressor
atggccagactcgacaagagcaaggtgatcaacagcgcactggagctgctgaacgaggtcggaatcgaaggcctcacaacccgtaagctcgcccagaagctcggggttgagcagcctacattgtactggcacgtcaagaacaagcgagctctgctagacgctatggccatagagatgctcgatcggcacaggactcactacttacccttggaaggggaaagctggcaagatttcttgaggaacaaggctaagtccatgagaaatgctttgctcagtcaccgtgatggagccaaggtctgtctaggtacgggcttcacggagagacaatatgaaactcaagagaacaaccttgccttcctgacacaacaaggtttctcccttgagaacgccctctacgcaaatcaagcagtggggatctacactctgggttgtgtcttgctggatcaagagctgcaagtcgctaaggaggagagggaaacacctactactgatagtatgccgccactggttcgacaagcttttgaactcgcggatcaccaaggtgcagagccagccttcctgttcggccttgaactgatcatatcaggattggagaagcagctgaaggccgaaagtgggtct

SEQ ID NO: 1349 - DNA, 621 bp, Artificial Sequence
  Nucleotides encoding Sulfonylurea responsive repressor
atggccagactcgacaagagcaaggtgatcaacagcgcactggagctgctgaacgaggtcggaatcgaaggcctcacaacccgtaagctcgcccagaagctcggggttgagcagcctacattgtactggcacgtcaagaacaagcgagctctgctagacgctatggccatagagatgctcgatcggcacaggattcactacttacccttggaaggggaaagctggcaagatttcttgaggaacaaggctaagtccatgagaaatgctttgctcagtcaccgtgatggagccaaggtctgtctaggtacgggcttcacggagcaacaatatgaaactcaagagaactcgcttgccttcctgacacaacaaggtttctcccttgagaacgccctctacgcaaatcaagcagtggggatctacactctgggttgtgtcttgctggatcaagagctgcaagtcgctaaggaggagagggaaacacctactactgatagtatgccgccactggttcgacaagctattgaactcgcggatcaccaaggtgcagagccagccttcctgttcggccttgaactgatcatatcaggattggagaagcagctgaaggccgaaagtgggtct

SEQ ID NO: 1350 - DNA, 621 bp, Artificial Sequence
  Nucleotides encoding Sulfonylurea responsive repressor
  misc_feature 190, 191, 192, 218, 244, 245, 246, 298, 299, 300, 322, 346,347, 529, 530: n = A,T,C or G
atggccagactcgacaagagcaaggtgatcaacagcgcactggagctgctgaacgaggtcggaatcgaaggcctcacaacccgtaagctcgcccagaagctcggggttgagcagcctacattgtactggcacgtcaagaacaagcgagctctgctagacgctatggccatagagatgctcgatcggcacnnnattcactacttacccttggaaggggnaagctggcaagatttcttgaggaacnnngctaagtccatgagaaatgctttgctcagtcaccgtgatggagccaaggtcnnnctaggtacgggcttcacggagnaacaatatgaaactatggagaacnnccttgccttcctgacacaacaaggtttctcccttgagaacgccctctacgcaatgcaagcagtggggatccacactctgggttgtgtcttgctggatcaagagctgcaagtcgctaaggaggagagggaaacacctactactgatagtatgccgccactggttcgacaagcttttgaactcnnggatcaccaaggtgcagagccagccttcctgttcggccttgaactgatcatatcaggattggagaagcagctgaaggccgaaagtgggtct

SEQ ID NO: 1351 - DNA, 621 bp, Artificial Sequence
  Nucleotides encoding Sulfonylurea responsive repressor
atggccagactcgacaagagcaaggtgatcaacagcgcactggagctgctgaacgaggtcggaatcgaaggcctcacaacccgtaagctcgcccagaagctcggggttgagcagcctacattgtactggcacgtcaagaacaagcgagctctgctagacgctatggccaaagagatgctggatcggcaccaaactcactacttacccttggaaggggaaagctggcaaaatttcttgaggaactgggctaagtccatgagaaatgctttgctcagtcaccgtgatggagccaaggtctgtctaggtacgggcttcacggagagacaatatgaaactgctgagaacaaccttgccttcctgaaacaacaaggtttctcccttgagaacgccctctacgcaaatcaagcagtggggatctacactctgggttgtgtcttgctggatcaagagctgcaagtcgctaaggaggagagggaaacacctactgctgatagtatgccgccactggttcgacaagctattgaactcaatgatcaccaaggtgcagagccagccttcctgttcggccttgaactgatcatatcaggattggagaagcagctgaaggccgaaagtgggtct

SEQ ID NO: 1352 - DNA, 621 bp, Artificial Sequence
  Nucleotides encoding Sulfonylurea responsive repressor
atggccagactcgacaagagcaaggtgatcaacagcgcactggagctgctgaacgaggtcggaatcgaaggcctcacaacccgtaagctcgcccagaagctcggggttgagcagcctacattgtactggcacgtcaagaacaagcgagctctgctagacgctatggccatagagatgctcgatcggcacaagactcactacttacccttggaaggggaaagctggcaagatttcttgaggaacaaggctaagtccatgagaaatgctttgctcagtcaccgtgatggagccaaggtcgcactaggtacgggcttcacggagaatcaatatgaaactgctgagaactcgcttgccttcctgacacaacaaggtttctcccttgagaacgccctctacgcattccaagcagtggggatctacactctgggttgtgtcttgctggatcaagagctgcaagtcgctaaggaggagagggaaacacctactactgatagtatgccgccactggttcgacaagctgttgaactcgcggatcaccaaggtgcagagccagccttcctgttcggccttgaactgatcatatcaggattggagaagcagctgaaggccgaaagtgggtct

SEQ ID NO: 1353 - DNA, 621 bp, Artificial Sequence
  Nucleotides encoding Sulfonylurea responsive repressor
atggccagactcgacaagagcaaggtgatcaacagcgcactggagctgctgaacgaggtcggaatcgaaggcctcacaacccgtaagctcgcccagaagctcggggttgagcagcctacattgtactggcacgtcaagaacaagcgagctctgctagacgctatggccatagagatgctcgatcggcaccaaattcactacttacccttggaaggggaaagctggcaagatttcttgaggaacagggctaagtccatgagaaatgctttgctcagtcaccgtgatggagccaaggtctgtctaggtacgggctacacggagcaacaatatgaaacttctgagaactcgcttgccttcctgacacaacaaggtttctcccttgagaacgccctctacgcattccaagcagtggggatctacactctgggttgtgtcttgctggatcaagagctgcaagtcgctaaggtggagagggaaacacctattactgatagtatgccgccactggttcgacaagctgttgaactcaatgatcaccaaggtgcagagccagccttcctgttcggccttgaactgatcatatcaggattggagaagcagctgaaggccgaaagtgggtct

SEQ ID NO: 1354 - DNA, 621 bp, Artificial Sequence
  Nucleotides encoding Sulfonylurea responsive repressor
atggccagactcgacaagagcaaggtgatcaacagcgcactggagctgctgaacgaggtcggaatcgaaggcctcacaacccgtaagctcgcccagaagctcggggttgagcagcctacattgtactggcacgtcaagaacaagcgagctctgctagacgctatggccatagagatgctcgatcggcaccaaactcactacttacccttggaaggggaaagctggcaagatttcttgaggaacaaggctaagtccatgagaaatgctttgctcagtcaccgtgatggagccaaggtcgcactaggtacgggcttcacggagaaacaatatgaaactcaagagaactcgcttgccttcctgacacaacaaggtttctcccttgagaacgccctctacgcaaatcaagcagtggggatctacactctgggttgtgtcttgctggatcaagagctgcaagtcgctaaggaggagagggaaacacctactactgatagtatgccgccactggttcgacaagcttttgaactcgcggatcaccaaggtgcagagccagccttcctgttcggccttgaactgatcatatcaggattggagaagcagctgaaggccgaaagtgggtct

SEQ ID NO: 1355 - DNA, 621 bp, Artificial Sequence
  Nucleotides encoding Sulfonylurea responsive repressor
atggccagactcgacaagagcaaggtgatcaacagcgcactggagctgctgaacgaggtcggaatcgaaggcctcacaacccgtaagctcgcccagaagctcggggttgagcagcctacattgtactggcacgtcaagaacaagcgagctctgctagacgctatggccatagagatgctcgatccgcacaagattcactacttacccttggaaggggaaagctggcaagatttcttgaggaacagggctaagtccatgagaaatgctttgctcagtcaccgtgatggagccaaggtctgtctaggtacgggcttcacggagcgacaatatgaaactgctgagaacacgcttgccttcctgacacaacaaggtttctcccttgagaacgccctctacgcattccaagcagtggggatctacactctgggttgtgtcttgctggatcaagagctgcaagtcgctaaggaggagagggaaacacctactactgatagtatgccgccactggttcgacaagcttacgaactcgcggatcaccaaggtgcagagccagccttcctgttcggccttgaactgatcatatcaggattggagaagcagctgaaggccgaaagtgggtct

SEQ ID NO: 1356 - DNA, 621 bp, Artificial Sequence
  Nucleotides encoding Sulfonylurea responsive repressor
atggccagactcgacaagagcaaggtgatcaacagcgcactggagctgctgaacgaggtcggaatcgaaggcctcacaacccgtaagctcgcccagaagctcggggttgagcagcctacattgtactggcacgtcaagaacaagcgagctctgctagacgctatggccatagagatgctcgatcggcacaggactcactacttacccttggaaggggaaagctggcaagatttcttgaggaacagggctaagtccatgagaaatgctttgctcagtcaccgtgatggagccaaggtctgtctaggtacgggcttcacggagaaacaatatgaaactcaagagaactcgcttgccttcctgacacaacaaggtttctcccttgagaacgccctctacgcaaatcaagcagtggggatctacactctgggttgtgtcttgctggatcaagagctgcaggtcgctaaggaggagagggaaacacctactactgatagtatgccgccactggttcgacaagcttttgaactcaatgatcaccaaggtgcagagccagccttcctgttcggccttgaactgctcatatcaggattggagaagcagctgaaggccgaaagtgggtct

SEQ ID NO: 1357 - DNA, 621 bp, Artificial Sequence
  Nucleotides encoding Sulfonylurea responsive repressor
atggccagactcgacaagagcaaggtgatcaacagcgcactggagctgctgaacgaggtcggaatcgaaggcctcacaacccgtaagctcgcccagaagctcggggttgagcagcctacattgtactggcacgtcaagaacaagcgagctctgctagacgctatggccatagagatgctcgatcggcacaggattcactacttacccttggaaggggaaagctggcaagatttcttgaggaacagggctaagtccatgagaaatgctttgctcagtcaccgtgatggagccaaggtctgtctaggtacgggcttcacggagcaacaatatgaaactgctgagaacaaccttgccttcctgacacaacaaggtttctcccttgagaacgccctctacgcaaatcaagcagtggggatctacactctgggttgtgtcttgctggttcaagagctgcatgtcgctaaggaggagagggaaacacctactactgatagtatgccgccactggttcgacaagctgttgaactcttcgatcaccaaggtgcagagccagccttcctgttcggccttgaactgatcatatcaggattggagaagcagctgaaggccgaaagtgggtct

SEQ ID NO: 1358 - DNA, 621 bp, Artificial Sequence
  Nucleotides encoding Sulfonylurea responsive repressor
atggccagactcgacaagagcaaggtgatcaacagcgcactggagctgctgaacgaggtcggaatcgaaggcctcacaacccgtaagctcgcccagaagctcggggttgagcagcctacattgtactggcacgtcaagaacaagcgagctctgctagacgctatggccatagagatgctcgatcggcacaagactcactacttacccttggaaggggaaagctggcaagatttcttgaggaacagggctaagtccatgagaaatgctttgctcagtcaccgtgatggagccaaggtctgtctaggtacgggcttcacggagcaacaatatgaaactatggagaactcgcttgccttcctgacacaacaaggtttctcccttgagaacgccctctacgcattccaagcagtggggatctacactctgggttgtgtcttgctggagcaagagctgcaagtcgctaaggaggagagggaaacacctactactgatagtatgccgccactggttcgacaagctgttgaactcgcggatcaccaaggtgcagagccagccttcctgttcggacttgaactgatcatatcaggattggagaagcagctgaaggccgaaagtgggtct

SEQ ID NO: 1359 - DNA, 621 bp, Artificial Sequence
  Nucleotides encoding Sulfonylurea responsive repressor
atggccagactcgacaagagcaaggtgatcaacagcgcactggagctgctgaacgaggtcggaatcgaaggcctcacaacccgtaagctcgcccagaagctcggggttgagcagcctacattgtactggcacgtcaagaacaagcgagctctgctagacgctatggccatagagatgctcgatcggcacaggactcactacttacccttggaaggggaaagctggcaagatttcttgaggaacagggctaagtccatgagaaatgctttgctcagtcaccgtgatggagccaaggtcgcactaggtacgggcttcacggagagacaatatgaaactcaagagaactcgcttgccttcctgacacaacaaggtttctcccttgagaacgccctctacgcaaatcaagcagtggggatctacactctgggttgtgtcttgctggatcaagagctgcaagtcgctaaggaggagagggaaacacctactactgatagtatgccgccactggttcgacaagctattgaactcaatgatcaccaaggtgcagagccagccttcctgttcggccttgaactgatcatatcaggattggagaagcagctgaaggccgaaagtgggtct

SEQ ID NO: 1360 - DNA, 621 bp, Artificial Sequence
  Nucleotides encoding Sulfonylurea responsive repressor
atggccagactcgacaagagcaaggtgatcaacagcgcactggagctgctgaacgaggtcggaatcgaaggcctcacaacccgtaagctcgcccagaagctcggggttgagcagcctacattgtactggcacgtcaagaacaagcgagctctgctagacgctatggccatagagatgctcgatcggcacaagattcactacttacccttggaaggggaaagctggcaagatttcttgaggaacagggctaagtccatgagaaatgctttgctcagtcaccgtgatggagccaaggtcgcactaggtacgggcttcacggagaaacaatatgaaactcaagagaacaaccttgccttcctgacacaacaaggtttctcccttgagaacgccctctacgcaaatcaagcagtggggatatacactctgggttgtgtcttgctggatcaagagctgcaagtcgctaaagaggagagggaaacacctactactgatagtatgccgccactggttcgacaagcttttgaactcaatgatcaccaaggtgcagagccagccttcctgttcggccttgaactgatcatatcaggattggagaagcagctgaaggccgaaagtgggtct

SEQ ID NO: 1361 - DNA, 621 bp, Artificial Sequence
  Nucleotides encoding Sulfonylurea responsive repressor
atggccagactcgacaagagcaaggtgatcaacagcgcactggagctgctgaacgaggtcggaatcgaaggcctcacaacccgtaagctcgcccagaagctcggggttgagcagcctacattgtactggcacgtcaagaacaagcgagctctgctagatgctatggccatagagatgctcgatcggcacaagattcactacttacccttggaaggggaaagctggcaggatttcttgaggaactgggctaagtccatgagaaatgctttgctcagtcaccgtgatggagccaaggtcgcactaggtacgggcttcacggagcaacaatatgaaacttctgagaactcgcttgccttcctgacacaacaaggtttctcccttgagaacgccctctacgcattccaagcagtggggatctacactctgggttgtgtcttgctggatcaagagctgcaagtcgctaaggaggagagggaaacacctattactgatagtatgccgccactggttcgacaagcttacgaactcgcggatcaccaaggtgcagagccagccttcctgttcggccttgaactgatcatatcaggattggagaagcagctgaaggccgatagtgggtct

SEQ ID NO: 1362 - DNA, 621 bp, Artificial Sequence
  Nucleotides encoding Sulfonylurea responsive repressor
atggccagactcgacaagagcaaggtgatcaacagcgcactggagctgctgaacgaggtcggaatcgaaggcctcacaacccgtaagctcgcccagaagctcggggttgagcagcctacattgtactggcacgtcaagaacaagcgagctctgctagacgctatggccagagagatgctcgatcggcaccaaactcactacttacccttggaaggggaaagctggcaaaatttcttgaggaacaaggctaagtccatgagaaatgctttgctcagtcaccgtgatggagccaaggtctgtctaggtacgggcttcacggagcgacaatatgaaacttctgagaactggcttgccttcctgacacaacaaggtttctcccttgagaacgccctctacgcattccaagcagtggggatctacactctgggttgtgtcttgctggatcaagagctgcaagtcgctaaggaggagagggaaacacctactactgatagtatgccgccactggttcgacaagctattgaactcgcggatcaccaaggtgcagagccagccttcctgttcggccttgaactgatcatatcaggattggagaagcagctgaaggccgaaagtgggtct

SEQ ID NO: 1363 - DNA, 621 bp, Artificial Sequence
  Nucleotides encoding Sulfonylurea responsive repressor
  misc_feature 190, 299, 322, 337, 338, 348: n = A,T,C or G
atggccagactcgacaagagcaaggtgatcaacagcgcactggagctgctgaacgaggtcggaatcgaaggcctcacaacccgtaagctcgcccagaagctcggggttgagcagcctacattgtactggcacgtcaagaacaagcgagctctgctagacgctatggccatagagatgctcgatcggcacnagattcactacttacccttggaaggggaaagctggcaaaatttcttgaggaacagggctaagtccatgagaaatgctttgctcagtcaccgtgatggagccaaggtctntctaggtacgggcttcacggagnaacaatatgaaactnntgagaactcncttgccttcctgacacaacaaggtttctcccttgagaacgccctctacgcaatgcaagcagtggggatctacactctgggttgtgtcttgctggatcaagagctgcaagtcgctaaggaggagagggaaacacctactactgatagtatgccgccactggttcgacaagctattgaactcgcggatcaccaaggtgcagagccagccttcctgttcggccttgaactgatcatatcaggattggagaagcagctgaaggccgaaagtgggtct

SEQ ID NO: 1364 - DNA, 621 bp, Artificial Sequence; identical to SEQ ID NO: 1343
  Nucleotides encoding Sulfonylurea responsive repressor

SEQ ID NO: 1365 - DNA, 621 bp, Artificial Sequence
  Nucleotides encoding Sulfonylurea responsive repressor
atggccagactcgacaagagcaaggtgatcaacagcgcactggagctgctgaacgaggtcggaatcgaaggcctcacaacccgtaagctcgcccagaagctcggggttgagcagcctacattgtactggcacgtcaagaacaagcgagctctgctagacgctatggccatagagatgctcgatcggcacaggattcactacttacccttggaaggggaaagctggcaagatttcttgaggaacaaggctaagtccatgagaaatgctttgctcagtcaccgtgatggagccaaggtctgtctaggtacgggcttcacggagcaacaatatgaaactcaagagaacaaccttgccttcctgacacaacaaggtttctcccttgagaacgccctctacgcaaatcaagcagtggggatctacactctgggttgtgtcttgctggatcaagagctgcaagtcgctaaggaggagagggaaacacctactactgatagtatgccgccactggttcgacaagctgttgaactcgcggatcaccaaggtgcagagccagccttcctgttcggccttgaactgatcatatcaggattggagaagcagctgaaggccgaaagtgggtct

SEQ ID NO: 1366 - DNA, 621 bp, Artificial Sequence
  Nucleotides encoding Sulfonylurea responsive repressor
atggccagactcgacaagagcaaggtgatcaacagcgcactggagctgctgaacgaggtcggaatcgaaggcctcacaacccgtaagctcgcccagaagctcggggttgagcagcctacattgtactggcacgtcaagaacaagcgagctctgctagacgctatggccatagagatgctcgatcggcacaagattcactacttacccttggaaggggaaagctggcaaaatttcttgaggaacagggctaagtccatgagaaatgctttgctcagtcaccgtgatggagccaaggtctgtctaggtacgggcttcacggagcaacaatatgaaactcaagagaacaaccttgccttcctgacacaacaaggtttctcccttgagaacgccctctacgcaaatcaagcagtggggatctacactctgagttgtgtcttgctggatcaagagctgcaagtcgctaaggaggagagggaaacacctactactgatagtatgccgccactggttcgacaagcttttgaactcgcggatcaccaaggtgcagagccagccttcctgttcggccttgaactgatcatatcaggattggagaagcagctgaaggccgaaagtgggtct

SEQ ID NO: 1367 - DNA, 621 bp, Artificial Sequence
  Nucleotides encoding Sulfonylurea responsive repressor
atggccagactcgacaagagcaaggtgatcaacagcgcactggagctgctgaacgaggtcggaatcgaaggcctcacaacccgtaagctcgcccagaagctcggggttgagcagcctacattgtactggcacgtcaagaacaagcgagctctgctagacgctatggccatagagatgctcgatcggcacaagattcactacttacccttggaaggggaaagctggcaagatttcttgaggaacaaggctaagtccatgagaaatgctttgctcagtcaccgtgatggagccaaggtctgtctaggtacgggcttcacggagcaacaatatgaaactcaagagaactcgcttgccttcctgacacaacaaggtttctcccttgagaacgccctctacgcaaatcaagcagtggggatctacactctgggttgtgtcttgctggatcaagagctgcaagtcgctaaggaggagagggaaacacctactactgatagtatgccgccactggttcgacaagcttacgaactcgcggatcaccaaggtgcagagccagccttcctgttcggccttgaactgatcatatcaggattggagaagcagctgaaggccgaaagtgggtct

SEQ ID NO: 1368 - DNA, 621 bp, Artificial Sequence
  Nucleotides encoding Sulfonylurea responsive repressor
atggccagactcgacaagagcaaggtgatcaacagcgcactggagctgctgaacgaggtcggaatcgaaggcctcacaacccgtaagctcgcccagaagctcggggttgagcagcctacattgtactggcacgtcaagaacaagcgagctctgctagacgctatggccatagagatgctcgatcggcaccaaactcactacttacccttggaaggggaaagctggcaaaatttcttgaggaacagggctaagtccatgagaaatgctttgctcagtcaccgtgatggagccaaggtctgtctaggtacgggcttcacggagaaacaatatgaaactcaagagaactcgcttgccttcctgacacaacaaggtttctcccttgagaacgccctctacgcaaatcaagcagtggggatctacactctgggttgtgtcttgctggatcaagagctgcaagtcgctaaggaggagagggaaacacctactactgatagtatgccgccactggttcgacaagctattgaactcgcggatcaccaaggtgcagagccagccttcctgttcggccttgaactgatcatatcaggattggagaagcagctgaaggccgaaagtgggtct

SEQ ID NO: 1369 - DNA, 621 bp, Artificial Sequence
  Nucleotides encoding Sulfonylurea responsive repressor
atggccagactcgacaagagcaaggtgatcaacagcgcactggagctgctgaacgaggtcggaatcgaaggcctcacaacccgtaagctcgcccagaagctcggggttgagcagcctacattgtactggcacgtcaagaacaagcgagctctgctagacgctatggccatagagatgctcgatcggcacacgactcactacttacccttggaaggggaaagctggcaaaatttcttgaggaactgggctaagtccatgagaaatgctttgctcagtcaccgtgatggagccaaggtctgtctaggtacgggcttcacggagcaacaatatgaaactatggagaactcgcttgccttcctgacacaacaaggtttctcccttgagaacgccctctacgcaatgcaagcagtggggatctacactctgggttgtgtcttgctggatcaagagctgcaagtcgctaaggaggagagggaaacacctactactgatagtatgccgccactggttcgacaagctgttgaactcgcggatcaccaaggtgcagagccagccttcctgttcggccttgaactgatcatatcaggattggagaagcagctgaaggccgaaagtgggtct

SEQ ID NO: 1370 - DNA, 621 bp, Artificial Sequence
  Nucleotides encoding Sulfonylurea responsive repressor
atggccagactcgacaagagcaaggtgatcaacagcgcactggagctgctgaacgaggtcggaatcgaaggcctcacaacccgtaagctcgcccagaagctcggggttgagcagcctacattgtactggcacgtcaagaacaagcgagctctgctagacgctatggccatagagatgctcggtcggcacaagactcactacttacccttggaaggggaaagctggcaagatttcttgaggaactgggctaagtccatgagaaatgctttgctcagtcaccgtgatggagccaaggtctgtctaggtacgggcttcacggagcaacaatatgaaactatggagaacaaccttgacttcctgacacaacaaggtttctcccttgagaacgccctctacgcaatgcaagcagtggggatctacactctgggtcgtgtcttgctggatcaagagctgcaagtcgcgaaggaggagagggaaacacctactactgatagtatgccgccactggttcgacaagcttttgaactcttcgatcaccaaggtgcagagccagccttcctgttcggccttgaactgatcatatcaggattggagaagcagctgaaggccgaaagtgggtct

SEQ ID NO: 1371 - DNA, 621 bp, Artificial Sequence
  Nucleotides encoding Sulfonylurea responsive repressor
atggccagactcgacaagagcaaggtgatcaacagcgcactggagctgctgaacgaggtcggaatcgaaggcctcacaacccgtaagctcgcccagaagctcggggttgagcagcctacattgtactggcacgtcaagaacaagcgagctctgctagacgctatggccatagagatgctcgatcggcaccaaattcactacttacccttggaaggggaaagctggcaaaatttcttgaggaacaaggctaagtccatgagaaatgctttgctcagtcaccgtgatggagccaaggtctgtctaggtacgggcttcacggagcaacaatatgaaactatggagaactcgcttgccttcctgacacaacaaggtttctcccttgagaacgccctctacgcattgcaagcagtggggatctacactctgggttgtgtgttgctggatcaggagctgcaagtcgctaaggaggagagggaaacacctactactgatagtatgccgccactggttcgacaagctattgaactcgcggatcaccaaggtgcagagccagccttcctgttcggccttgaactgatcatatcaggattggagaagcagctgaaggccgaaagtgggtct

SEQ ID NO: 1372 - DNA, 621 bp, Artificial Sequence
  Nucleotides encoding Sulfonylurea responsive repressor
atggccagactcgacaagagcaaggtgatcaacagcgcactggagctgctgaacgaggtcggaatcgaaggcctcacaacccgtaagctcgcccagaagctcggggttgagcagcctacattgtactggcacgtcaagaacaagcgagctctgctagacgctatggccagagagatgctcgatcggcacaagactcactacttacccttggaaggggaaagctggcaaaatttcttgaggaactgggctaagtccatgagaaatgctttgctcagtcaccgtgatggagccaaggtctgtctaggtacgggcttcacggagcaacaatatgaaactgctgagaacaaccttgccttcctgacacaacaaggtttctcccttgagaaagccctctacgcattccaagcagtggggatctacactctgggttgtgtcttgctggatcaagagctgcaagtcgctaaggaggagagggaaacacctactactgatagtatgccgcctctggttcgacaagcttttgaactcttcgatcaccaaggtgcagagccagccttcctgttcggccttgaactgatcatatcaggattggagaagcagctgaaggccgaaagtgggtct

SEQ ID NO: 1373 - DNA, 621 bp, Artificial Sequence
  Nucleotides encoding Sulfonylurea responsive repressor
atggccagactcgacaagagcaaggtgatcaacagcgcactggagctgctgaacgaggtcggaatcgaaggcctcacaacccgtaagctcgcccagaagctcggggttgagcagcctacattgtactggcacgtcaagaacaagcgagctctgctagacgctatggccatagagatgctcgatcggcacacgactcactacttacccttggaaggggaaagctggcaaaatttcttgaggaacagggctaagtccatgagaaatgctttgctcagtcaccgtgatggagccaaggtagcactaggtacgggcttcacggagaaacaatatgaaactcaagagaacaaccttgccttcctgacacaacaaggtttctcccttgagaacgccctctacgcaaatcaagcagtggggatctacactctgggttgtgtcttgctggatcaagagctgcaagtcgctaaggaggagagggaaacacctactactgatagtatgccgccactggttcgacaagctgttgaactcgcggatcaccaaggtgcagagccagccttcctgttcggccttgaactgatcatatcaggattggagaagcagctgaaggccgaaagtgggtct

SEQ ID NO: 1374 - DNA, 621 bp, Artificial Sequence
  Nucleotides encoding Sulfonylurea responsive repressor
atggccagactcgacaagagcaaggtgatcaacagcgcactggagctgctgaacgaggtcggaatcgaaggcctcacaacccgtaagctcgcccagaagctcggggttgagcagcctacattgtactggcacgtcaagaacaagcgagctctgctagacgctatggccatagagatgctcgatcggcacaaaactcactacttacccttggaaggggaaagctggcaagatttcttgaggaacagggctaagtccatgagaaatgctttgctcagtcaccgtgatggagccaaggtctgtctaggtacgggcttcacggagagacaatatgaaactcaagagaacaaccttgccttcctgacacaacaaggtttctcccttgagaacgccctctacgcaaatcaagcagtggggatctacactctgggttgtgtcttgctggatcaagagctgcaagtcgctaaggaggagagggaaacacctactactgatagtatgccgccactggttcgacaagctattgaactcgcggatcaccaaggtgcagagccagccttcctgttcggccttgaactgatcatatcaggattggagaagcagctgaaggccgaaagtgggtct

SEQ ID NO: 1375 - DNA, 621 bp, Artificial Sequence
  Nucleotides encoding Sulfonylurea responsive repressor
atggccagactcgacaagagcaaggtgatcaacagcgcactggagctgctgaacgaggtcggaatcgaaggcctcacaacccgtaagctcgcccagaagctcggggttgagcagcctacattgtactggcacgtcaagaacaagcgagctctgctagacgctatggccatagagatgctcgatcggcacaagactcactacttacccttggaaggggaaagctggcaagatttcttgaggaacaaggctaagtccatgagaattgctttgctcagtcaccgtgatggagccaaggtctgtctaggtacgggcttcacggagaaacaatatgaaactgctgagaacacgcttgccttcctgacacaacaaggtttctcccttgagaacgccctctacgcattccaagcagtggggatctacactctgggttgtgtcttgctggatcaagagctgcaagtcgctaaggaggagagggaaacacctactactgatagtatgccgccactggttcgacaagcttttgaactcgcggatcaccaaggtgcagagccagccttcctgttcggccttgaactgatcatatcaggattggagaagcagctgaaggccgaaagtgggtct

SEQ ID NO: 1376 - DNA, 621 bp, Artificial Sequence
  Nucleotides encoding Sulfonylurea responsive repressor
atggccagactcgacaagagcaaggtgatcaacagcgcactggagctgctgaacgaggtcggaatcgaaggcctcacaacccgtaagctcgcccagaagctcggggttgagcagcctacattgtactggcacgtcaagaacaagcgagctctgctagacgctatggccatagagatgctcgatcggcacaggattcactacttacccttggaaggggaaagctggcaagatttcttgaggaactgggctaagtccatgagaaatgctttgctcagtcaccgtgatggagccaaggtctgtctaggtacgggcttcacggagcgacaatatgaaactcaagagaacaagcttgccttcctgacacaacaaggtttctcccttgagaacgccctctacgcaaatcaagcagtggggatctacactctgggttgtgtcttgctggatcaagagctgcaagtcgctaaggaggagagggaaacacctactactgatagtatgccgccactggttcgacaagctattgaactcgcggatcaccaaggtgcagagccagccttcctgttcggccttgaactgatcatatctggattggagaagcagctggaggccgaaagtgggtct

SEQ ID NO: 1377 - DNA, 622 bp, Artificial Sequence
  Nucleotides encoding Sulfonylurea responsive repressor
atggccagactcgacaagagcaaggtgatcaacagcgcactggagctgctgaacgaggtcggaatcgaaggcctcacaacccgtaagctcgcccagaagctcggggttgagcagcctacattgtactggcacgtcaagaacaagcgagctctgctagacgctatggccatagagatgctcgatcggcacaggactcactacttacccttggaaggggaaagctggcaagatttcttgaggaactgggctaagtccatgagaaatgctttgctcagtcaccgtgatggagccaaggtctgtctaggtacgggcttcacggagcaacaatatgaaacttctgagaacaagcttgccttcctgacacaacaaggtttctcccttgagaacgccctctacgtattccaagcagtggggatctacactctgggttgtgccttgctggatcaagagctgcaagtcgctaaggaggagagggaaacacctactactgatagtatgccgccactggttcgacaagctgttgaactcttcgatcaccaaggtgcagagccagccttcctgttcggccttgaactgatcatatcaggattggagaagcagctgaaggccgaaagtgggtctg

SEQ ID NO: 1378 - DNA, 621 bp, Artificial Sequence
  Nucleotides encoding Sulfonylurea responsive repressor
atggccagactcgacaagagcaaggtgatcaacagcgcactggagctgctgaacgaggtcggaatcgaaggcctcacaacccgtaagctcgcccagaagctcggggttgagcagcctacattgtactggcacgtcaagaacaagcgagctctgctagacgctatggccatagagatgctcgatccgcacaggattcactacttacccttggaaggggaaagctggcaaaatttcttgaggaactgggctaagtccatgagaaatgctttgctcagtcaccgtgatggagccaaggtctgtctaggtacgggcttcacggagcaacaatatgaaactatggagaactcgcttgccttcctgacacaacaaggtttctcccttgagaacgccctctacgcaatgcaagcagtggggatctacactctgggttgtgtcttgctggatcaagagctgcaagtcgctaaggaggagagggaaacacctactactgatagtatgccgccactggttcgacaagctgttgaactcgcggatcaccaaggtgcagagccagccttcctgttcggccttgaactgatcatatcaggattggagaagcagctgaaggccgaaagtgggtct

SEQ ID NO: 1379 - DNA, 621 bp, Artificial Sequence
  Nucleotides encoding Sulfonylurea responsive repressor
atggccagactcgacaagagcaaggtgatcaacagcgcactggagctgctgaacgaggtcggaatcgaaggcctcacaacccgtaagctcgcccagaagctcggggttgagcagcctacattgtactggcacgtcaagaacaagcgagctctgctagacgctatggccatagagatgctcgatcggcaccaaactcactacttacccttggaaggggaaagctggcaagatttcttgaggaacaatgctaagtccatgagaaatgctttgctcagtcaccgtgatggagccaaggtcgcactaggtacgggcttcacggagagacaatatgaaactcaagagaacaagcttgccttcctgacacaacaaggtttctcccttgagaacgccctctacgcaaatcaagcagtggggatctacactctgggttgtgtcttgctggatcaagagctgcaagtcgctaaggaggagagggaaacacctactactgatagtatgccgccactggttcgacaagctgttgaactcgcggatcaccaaggtgcagagccagccttcctgttcggccttgaactgatcatatcaggattggagaagcagctgaaggccgaaagtgggtct

SEQ ID NO: 1380 - DNA, 621 bp, Artificial Sequence
  Nucleotides encoding Sulfonylurea responsive repressor
atggccagactcgacaagagcaaggtgatcaacagcgcactggagctgctgaacgaggtcggaatcgaaggcctcacaacccgtaagctcgcccagaagctcggggttgagcagcctacattgtactggcacgtcaagaacaagcgagctctgctagacgctatggccatagagatgctcgatcggcacaagattcactacttacccttggaaggggaaagctggcaagatttcttgaggaacaaggctaagtccatgagaaatgctttgctcagtcaccgtgatggagccaaggtctgtctaggtacgggcttcacggagcaacaatatgaaactcaagagaacaaccttgccttcctgacacaacaaggtttctcccttgagaacgccctctacgcaatgcaagcagtggggatctacactctgggttatgtcttgctagatcaagagctgcaagtcgctaaggaggagagggaaacacctactactgatagtatgccgccactggttcgacaagctattgaactcgcggatcaccaaggtgcagagccagccttcctgttcggccttgaactgatcatatcaggattggagaagcagctgaaggccgaaagtgagtct

SEQ ID NO: 1381 - protein, 207 aa, Artificial Sequence
  Sulfonylurea responsive repressor
MARLDKSKVINSALELLNEVGIEGLTTRKLAQKLGVEQPTLYWHVKNKRALLDAMAIEMLDRHATHYCPLEGESWQDFLRNKAKSMRNALLSHRDGAKVCLGTGFTEQQYETAENSLAFLCQQGFSLENALYAMQAVGIYTLGCVLLDQELQVAKEERETPTTDSMPPLVRQALELKDHQGAEPAFLFGLELIIAGLEKQLKAESGS

SEQ ID NO: 1382 - protein, 207 aa, Artificial Sequence
  Sulfonylurea responsive repressor
MARLDKSKVINSALELLNEVGIEGLTTRKLAQKLGVEQPTLYWHVKNKRALLDAMAIEMLDRHATHYCPLEGESWQDFLRNKAKSMRCALLSHRDGAKVCLGTGFTEQQYETAENSLAFLCQQGFSLENALYAMQAVGIYTLGCVLLDQELQVAKEERETPTTDSMPPLVRQALELKDHQGAEPAFLFGLELIISGLEKQLKAESGS

SEQ ID NO: 1383 - protein, 207 aa, Artificial Sequence
  Sulfonylurea responsive repressor
MARLDKSKVINSALELLNEVGIEGLTTRKLAQKLGVEQPTLYWHVKNKRALLDAMAIEMLDRHATHYLPLEGASWQDFLRNKAKSMRNALLSHRDGAKVCLGTGFTEQQYETAENSLAFLCQQGFSLENALYAMQAVGIYTLGCVLLDQELQVAKEERETPTTDSMPPLVRQALELKDHQGAEPAFLFGLELIIAGLEKQLKSESGS

SEQ ID NO: 1384 - protein, 207 aa, Artificial Sequence
  Sulfonylurea responsive repressor
MARLDKSKVINSALELLNEVGIEGLTTRKLAQKLGVEQPTLYWHVKNKRALLDAMAIEMLDPHAIHLLPLEGASWQDFLRNNAKSMRRALLSHRDGAKVCLGTGFTEQQYETAENSLAFLCQQGFSLENALYAMQAVGIYTLGCVLLDQELQVAKEERETPTTDSMPPLVRQALELKDHQGAEPAFLFGLELIICGLEKQLKAESGS

SEQ ID NO: 1385 - protein, 207 aa, Artificial Sequence
  Sulfonylurea responsive repressor
MARLDKSKVINSALELLNEVGIEGLTTRKLAQKLGVEQPTLYWHVKNKRALLDAMAIEMLDRHATHYLPLEGESWQDFLRNKAKSMRCALLSHRDGAKVCLGTGFTEQQYETAENSLAFLTQQGFSLENALYAMQAVGIYTLGCVLLDQELQVAKEERETPTTDSMPPLVRQALELKDHQGAELAFLFGLELIIRGLEKQLKCESGS

SEQ ID NO: 1386 - protein, 207 aa, Artificial Sequence
  Sulfonylurea responsive repressor
MARLDKSKVINSALELLNEVGIEGLTTRKLAQKLGVEQPTLYWHVKNKRALLDAMAIEMLDPHATHFCLLEGESWQDFLRNNAKSMRNALLSHRDGAKVCLGTGFTEQQYETAENSLAFLCQQGFSLENALYAMQAVGIYTLGCVLLDQELQVAKEERETPTTDSMPPLVRQALELKDHQGAEPAFLFGLELIISGLEKQLKCESGS

SEQ ID NO: 1387 - protein, 207 aa, Artificial Sequence
  Sulfonylurea responsive repressor
MARLDKSKVINSALELLNEVGIEGLTTRKLAQKLGVEQPTLYWHVKNKRALLDAMAIEMLDRHATHYSPLEGESWQDFLRNKAKSMRCALLSHRDGAKVCLGTGFTEQQYETAENSLAFLTQQGFSLENALYAMQAVGIYTLGCVLLDQELQVAKEERETPTTDSMPPLVRQALELKDHQGAEPAFLFGLELIIAGLEKQLKAESGS

SEQ ID NO: 1388 - protein, 207 aa, Artificial Sequence
  Sulfonylurea responsive repressor
MARLDKSKVINSALELLNEVGIEGLTTRKLAQKLGVEQPTLYWHVKNKRALLDAMAIEMLDPHAPHLLPLEGASWQDFLRNNAKSMRCALLSHRDGAKVCLGTGFTEQQYETAENSLAFLTQQGFSLENALYAMQAVGIYTLGCALLDQELQVAKEERETPTTDSMPPLVRQALELKDHQGAEPAFLFGLELIISGLEKQLKRESGS

SEQ ID NO: 1389 - protein, 207 aa, Artificial Sequence; identical to SEQ ID NO: 407
  Sulfonylurea responsive repressor

SEQ ID NO: 1390 - protein, 207 aa, Artificial Sequence
  Sulfonylurea responsive repressor
MARLDKSKVINSALELLNEVGIEGLTTRKLAQKLGVEQPTLYWHVKNKRALLDAMAIEMLDRHATHYLPLEGASWQDFLRNKAKSMRRALLSHRDGAKVCLGTGFTEQQYETAENSLAFLTQQGFSLENALYAMQAVGIYTLGCVLLNQELQVAKEERETPTTDSMPPLVRQALELKDHQGAEPAFLFGLELIIAGLEKQLKAESGS

SEQ ID NO: 1391 - protein, 207 aa, Artificial Sequence
  Sulfonylurea responsive repressor
MARLDKSKVINSALELLNEVGIEGLTTRKLAQKLGVEQPTLYWHVKNKRALLDAMAIEMLDRHATHYCPLEGESWQDFLRNKAKSMRNALLSHRDGAKVCLGTGFTEQQYETAENSLAFLTQQGFSLENALYAMQAVGIYTLGCVLLDQELQVAKEERETPTTDSMPPLVRQALELKDHQGAEPAFLFGLELIIAGLEKQLKAESGS

SEQ ID NO: 1392 - protein, 207 aa, Artificial Sequence; identical to SEQ ID NO: 404
  Sulfonylurea responsive repressor

SEQ ID NO: 1393 - protein, 207 aa, Artificial Sequence
  Sulfonylurea responsive repressor
MARLDKSKVINSALELLNEVGIEGLTTRKLAQKLGVEQPTLYWHVKNKRALLDAMAIEMLDPHATHYSPLEGESWQDFLRNKAKSMRCALLSHRDGAKVCLGTGFTEQQYETAENSLAFLCQQGFSLENALYAMQAVGIYTLGSALLDQELQVAKEERETPTTDSMPPLVRQALNLKDHQGAEPAFLFGLELIIRGLEKQLKCESGS

SEQ ID NO: 1394 - protein, 207 aa, Artificial Sequence
  Sulfonylurea responsive repressor
MARLDKSKVINSALELLNEVGIEGLTTRKLAQKLGVEQPTLYWHVKNKRALLDAMAIEMLDRHATHYSPLERESWQNFLRNNAKSMRNALLSHRDGAKVCLGTGFTEQQYETAENSLAFLTQQGFSLENALYAMQAVGIYTLGCVLLDQELQVAKEERETPTTDSMPPLVRQAVELKDHQGAEPAFLFGLELIIAGLEKQLKCESGS

SEQ ID NO: 1395 - protein, 207 aa, Artificial Sequence
  Sulfonylurea responsive repressor
MARLDKSKVINSALELLNEVGIEGLTTRKLAQKLGVEQPTLYWHVKNKRALLDAMAIEMLNRHATQYCPLEGESWQNFLRNNAKSMRCALLSHRDGAKVCLGTGFTEQQYETAENSLAFLTQQGFSLENALYAMQAVGIYTLGCVLLDQELQVAKEERETPTTDSMPPLVRQAVELKDHQGAEPAFLFGLELIISGLEKQLKRESGS

SEQ ID NO: 1396 - protein, 208 aa, Artificial Sequence
  Sulfonylurea responsive repressor
MGSRLDKSKVINSALELLNEVGIEGLTTRKLAQKLGVEQPTLYWHVKNKRALLDAMAFEMLDRHAIHYLPLEGESWQNFLRNNAKSMRNALLSHRDGAKVCLGTGFTEQQYETAENRLAFLTQHGFSLEQALYAWQAVGIYTLGCVLLDQQLQVAKEERETPTTDSMPPLVRQAWELKDHQGAEPAFLFGLELIISGLEKQLKAESGS

SEQ ID NO: 1397 - protein, 208 aa, Artificial Sequence
  Sulfonylurea responsive repressor
MGSRLDKSKVINSALELLNEVGIEGLTTRKLAQKLGVEQPTLYWHVKNKRALLDAMAFEMLDRHAIHYLPLEGESWQNFLRNNAKSMRNALLSHRDGAKVSLGTGFTEQQYETAEKRLAFLTQQGFSLENALYAWQAVGIYTLGCVLLDQELQVAKEERETPTTDSMPPLVRQAWELKDHQGAEPAFLFGLELIISGLEKQLKAESGS

SEQ ID NO: 1398 - protein, 208 aa, Artificial Sequence
  Sulfonylurea responsive repressor
MGSRLDKSKVINSALELLNEVGIEGLTTRKLAQKLGVEQPTLYWHVKNKRALLDAMAIEMLDRHAIHYLPLEGASWQNFLRNNAKSMRNALLSHRDGAKVCLGTGFTEQQYETAENCLAFLTQQGFSLENALYAWQAVGIYTLGCVLLDQELQVAKEERETPTTDSMPPLVRQAWALKDHQGAEPAFLFGLELIISGLEKQLKAESGS

SEQ ID NO: 1399 - protein, 208 aa, Artificial Sequence
  Sulfonylurea responsive repressor
MGSRLDKSKVINSALELLNEVGIEGLTTRKLAQKLGVEQPTLYWHVKNKRALLDAMAFEMLDRHAIHFLPLEGASWQNFLRNTAKSMRNALLSHRDGAKVCLGTGFTERQYETAENRLAFLTQQGFSLEQALYAWQAVGIYTLGCVLLDQELQVAKEERETPTTDSMPPLVRQAWELKDHQGAEPAFLFGLELIISGLEKQLKAESGS

SEQ ID NO: 1400 - protein, 208 aa, Artificial Sequence
  Sulfonylurea responsive repressor
MGSRLDKSKVINSALELLNEVGIEGLTTRKLAQKLGVEQPTLYWHVKNKRALLDAMAFEMLDPHAIHYLPLEGESWQNFLRNHAKSMRNALLSHRDGAKVCLGTGFTEQQYETAENRLAFLTQQGFSLENALYAWQAVGIYTLGCVLLDQELQVAKEERETPTTDSMPPLVRQAWELKDHQGAEPAFLFGLELIISGLEKQLKAESGS

SEQ ID NO: 1401 - protein, 208 aa, Artificial Sequence
  Sulfonylurea responsive repressor
MGSRLDKSKVINSALELLNEVGIEGLTTRKLAQKLGVEQPTLYWHVKNKRALLDAMAIEMLDRHAIHYLPLEGASWQNFLRNNAKSMRNALLSHRDGAKVCLGTGFTEQQYETAENRLAFLTQQGFSLEQALYAWQAVGIYTLGCVLLDQELQVAKEERETPTNDSMPPLVRQAWELKDHQGAEPAFLFGLELIISGLEKQLKAESGS

SEQ ID NO: 1402 - protein, 208 aa, Artificial Sequence
  Sulfonylurea responsive repressor
MGSRLDKSKVINSALELLNEVGIEGLTTRKLAQKLGVEQPTLYWHVKNKRALLDAMAFEMLDRHAPHFLLLEGASWQNFLRNKAKSMRNALLSHRDGAKVCLGTGFTEKQYETAENSLAFLTQQGFSLENALYAWQAVGIYTLGCVLLDQELQVAKEERETPTTDSMPPLVRQAWELKDHQGAEPAFLFGLELIISGLEKQLKAESGS

SEQ ID NO: 1403 - protein, 208 aa, Artificial Sequence
  Sulfonylurea responsive repressor
MGSRLDKSKVINSALELLNEVGIEGLTTRKLAQKLGVEQPTLYWHVKNKRALLDAMAFEMLNRHAIHYLPLEGESWQNFLRNNAKSMRNALLSHRDGAKVCLGTGFTEQQYETAENRLAFLTQQGFSLEQALYAWQAVGIYTLGCALLDQELQVAKEERETPTTDSMPPLVRQAWELKDHQGAEPAFLFGLELIISGLEKQLKAESGS

SEQ ID NO: 1404 - protein, 208 aa, Artificial Sequence
  Sulfonylurea responsive repressor
MGSRLDKSKVINSALELLNEVGIEGLTTRKLAQKLGVEQPTLYWHVKNKRALLDAMAIEMLDRHAIHFLSLEGESWQNFLRNKAMSMRNALLSNRDGAKVCLGTGFTEQQYETAENSLAFLTQQGFSLENALYAWQAVGIYTLGCVLLDQELHVAKEERETPTTDSMPPLVRQAWELKDHQGAEPAFLFGLELIISGLEKQLKAESGS

SEQ ID NO: 1405 - protein, 207 aa, Artificial Sequence
  Sulfonylurea responsive repressor
MGSRLDKSKVINSALELLNEVGIEGLTTRKLAQKLGVEQPTLYWHVKNKRALLDAMAIEMLDRHATHYLPLEGASWQNFLRNNAKSMRNALLSHRDGAKVCLGTGFTEQQYETAENRLAFLTQQGFSLEQALYAWQAVGIYTLGCVLLDQELQVAKEERETPTDSMPPLVRQAWELKDHQGAEPAFLFGLELIISGLEKQLKAESGS

SEQ ID NO: 1406 - protein, 208 aa, Artificial Sequence
  Sulfonylurea responsive repressor
MGSRLDKSKVINSALELLNEVGIEGLTTRKLAQKLGVEQPTLYWHVKNKRALLDAMAFEMLDRHAPHYLPLEGASWQNFLRNNAKSMRNALLSHRDGAKVCLGTGFTEQQYETAENHLAFLTQQGFSLENALYAWQAVGIYTLGCVLLDQQLQVAKEERETPTTDSMPPLVRQAWELKDHQGAEPAFLFGLELIISGLEKQLKAESGS

SEQ ID NO: 1407 - protein, 207 aa, Artificial Sequence
  Sulfonylurea responsive repressor
  VARIANT 202: Xaa = Any Amino Acid
MGSRLDKSKVINSALELLNEVGIEGLTTRKLAQKLGVEQPTLYWHVKNKRALLDAMAIEMLDRHATHYLPLEGESWQNFLRNNAKSMRNALLSHRDGAKVCLGTGFTEQQYETAENRLAFLTQQGFSLENALYAWQAVGIYTLGCVLLDQELQVAKEERETPTTDSMPPLVRQAWELKDHQGAEPAFLFGLELIISGLEKSXRRKWV

SEQ ID NO: 1408 - protein, 207 aa, Artificial Sequence
  Sulfonylurea responsive repressor
MARLDKSKVINSALELLNEVGIEGLTTRKLAQKLGVEQPTLYWHVKNKRALLDAMAIEMLDRHAIHYLPLEGASWQNFLRNNAKSMRNALLSHRDGAKVCLGTGFTEQQYETAENSLAFLTQQGFSLEQALYAWQAVGIYTLGCVLLDQELQFAKEERETPTTDSMPPLVRQAVELKDHQGAEPAFLFGLELIISGLEKQLKAESGS

SEQ ID NO: 1409 - protein, 207 aa, Artificial Sequence
  Sulfonylurea responsive repressor
MARLDKSKVINSALELLNEVGIEGLTTRKLAQKLGVEQPTLYWHVKNKRALLDAMAIEMLDRHAIHYLPLEGESWQNFLRNNAKSMRNALLSHRDGAKVCLGTGFTEQQYETAENRLAFLTQQGFSLEKALYAWQAVGIYTLGCVLLDQELQVAKEERETPTTDSMPPLVRQAWELKDHQGAEPAFLFGLELIISGLEKQLKAESGS

SEQ ID NO: 1410 - protein, 207 aa, Artificial Sequence
  Sulfonylurea responsive repressor
MARLDKSKVINSALELLNEVGIEGLTTRKLAQKLGVEQPTLYWHVKNKRALLDAMAIEMLDRHAIHYLPLEGESWQNFLRNNAKSMRNALLSHRDGAKVCLGTGFTEQQYETAENRLAFLTQQGFSLENALYAWQAVGIYTLGCVLLDQELQVAKEERETPTTDSMPPLVRQAWELKDHQGAEPAFLFGLELIISGLEKQLKAESGS

SEQ ID NO: 1411 - protein, 207 aa, Artificial Sequence; identical to SEQ ID NO: 1410
  Sulfonylurea responsive repressor

SEQ ID NO: 1412 - protein, 207 aa, Artificial Sequence; identical to SEQ ID NO: 1410
  Sulfonylurea responsive repressor

SEQ ID NO: 1413 - protein, 207 aa, Artificial Sequence
  Sulfonylurea responsive repressor
MARLDKSKVINSALELLNEVGIEGLTTRKLAQKLGVEQPTLYWHVKNKRALLDAMAFEMLDRHATHYLPLEGESWQNFLRNNAKSMRNALLSHRDGAKVCLGTGFTERQYETAENRLAFLTQQGFSLENALYAWQAVGIYTLGCVLLDQELQVAKEERETPTTDSMPPLVRQAWELKDHQGAEPAFLFGLELIISGLEKQLKAESGS

SEQ ID NO: 1414 - protein, 207 aa, Artificial Sequence
  Sulfonylurea responsive repressor
MARLDKSKVINSALELLNEVGIEGLTTRKLAQKLGVEQPTLYWHVKNKRALLDAMAFEMLDRHAIHYLPLEGASWQNFLRNNAKSMRNALLSHRDGAKLCLGTGFTEQQYETAENRLAFLTQQGFSLEQALYAWQAVGIYTLGCVLLDQELQVAKEERETPTTDSMPPLVRQAWELKDHQGAEPAFLFGLELIISGLEKQLKAESGS

SEQ ID NO: 1415 - protein, 207 aa, Artificial Sequence; identical to SEQ ID NO: 1410
  Sulfonylurea responsive repressor

SEQ ID NO: 1416 - protein, 207 aa, Artificial Sequence
  Sulfonylurea responsive repressor
MARLDKSKVINSALELLNEVGIEGLTTRKLAQKLGVEQPTLYWHVKNKRALLDAMAIEMLDRHAIHYLPLEGESWQNFLRNNAKSMRNALLSHRDGAKVCLGTGFTEQQYETAENRLAFLTQQGFSLEQALYAWQAVGIYTLGCVLLDQELQVAKEERETPTTDSMPPLVRQAWELKDHQGSEPAFLFGLELIISGLEKQLKAESGY

SEQ ID NO: 1417 - protein, 207 aa, Artificial Sequence
  Sulfonylurea responsive repressor
MARLDKSKVINSALELLNEVGIEGLTTRKLAQKLGVEQPTLYWHVKNKRALLDAMAIEMLDRHAIHYLPLEGESWQNFLRNNAKSMRNALLSHRDGAKVCLGTGFTEQQYETAENRLAFLTQQGFSLENALYAWQAVGIYTLGCVLLDQELQVAKEERETPTTDSMPPLVRQALELKDHQGAEPAFLFGLELIISGLEKQLKAESGS

SEQ ID NO: 1418 - protein, 206 aa, Artificial Sequence
  Sulfonylurea responsive repressor
MARLDKSKVINSALELLNEVGIEGLTTRKLAQKLGVEQPTLYWHVKNKRALLDAMAIEMLDRHAIHYLPLEGESWQNFLRNNAKSMRNALLSHRDGAKVCLGTGFTEQQYETAENRLAFLTQQGFSLEQALYAWQAVGIYTLGCVLLDQELQVAKEERETPTTDSMPPLVRQAWELKDHQGAEPAFLFGLELIISGLEKLKAESGS

SEQ ID NO: 1419 - protein, 207 aa, Artificial Sequence
  Sulfonylurea responsive repressor
MARLDKSKVINSALELLNEVGIEGLTTRKLAQKLGVEQPTLYWHVKNKRALLDAMAIEMLDRHATHFLPLEGESWQNFLRNNAKSMRNALLSHRDGAKVCLGTGFTKQQYETAENRLAFLTQQGFSLEQALYAWQAVGIYTLGCVLLDQELQVAKEERETPTTDSMPPLVRQAWELKDHQGAEPAFLFGLELIISGLEKQLKAESGS

SEQ ID NO: 1420 - protein, 208 aa, Artificial Sequence
  Sulfonylurea responsive repressor
MGSRLDKSKVINSALELLNEVGIEGLTTRKLAQKLGVEQPTLYWHVKNKRALLDAMAIEMLDRHKTHYLPLEGESWQDFLRNRAKSMRNALLSHRDGAKVALGTGFTEQQYETMENSLAFLTQQGFSLENALYAFQAVGIYTLGCVLLDQELQVAKEERETPTTDSMPPLVRQAYELRDHQGAEPAFLFGLELIISGLEKQLKAESGS

SEQ ID NO: 1421 - protein, 208 aa, Artificial Sequence
  Sulfonylurea responsive repressor
MGSRLDKSKVINSALELLNEVGIEGLTTRKLAQKLGVEQPTLYWHVKNKRALLDAMAIEMFDRHKTHYLPLEGESWQDFLRNNAKSRRNALLSHRDGAKVALGTGFTEQQYETMENCLAFLTQQGFSLENALYAFQAVGIYTLGCVLLDQELQVAKEERETPTTDSMPPLVRQAYELKDHQGAEPAFLFGLELIICGLEKQLKCESGS

SEQ ID NO: 1422 - protein, 208 aa, Artificial Sequence
  Sulfonylurea responsive repressor
MGSRLDKSKVINSALELLNEVGIEGLTTRKLAQKLGVEQPTLYWHVKNKRALLDAMAIEMLDRHDTHYLPLEGESWQDFLRNNAKSRRNALLSHRDGAKVALGTGFTEQQYETMENSLAFLTQQGFSLENALYAMQAVGIYTLGCVLLDQELQVAKEERETPTTDSMPPLVRQAYELKDHQGAEPAFLFGLELIICGLEKQLKCESGS

SEQ ID NO: 1423 - protein, 208 aa, Artificial Sequence
  Sulfonylurea responsive repressor
MGSRLDKSKVINSALELLNEVGIEGLTTRKLAQKLGVEQPTLYWHVKNKRALLDAMAIEMFDRHATHYLPLEGESWQDFLRNRAKSRRNALLSHRDGAKVALGTGFTEQQYETAENWLAFLTQQGFSLENALYAMQAVGIYTLGCVLLDQELQVAKEERETPTTDSMPPLVRQAYELKDHQGAEPAFLFGLELIICGLEKQLKCESGS

SEQ ID NO: 1424 - protein, 208 aa, Artificial Sequence
  Sulfonylurea responsive repressor
  VARIANT 117: Xaa = Any Amino Acid
MGSRLDKSKVINSALELLNEVGIEGLTTRKLAQKLGVEQPTLYWHVKNKRALLDAMAIEMLDRHKTHYCPLEGESWQDFLRNRAKSRRNALLSHRDGAKVCLGTGFTEQQYETAENXLAFLTQQGFSLENALYAMQAVGIYTLGCVLLDQELQVAKEERETPTTDSMPPLVRQALELHDHQGAEPAFLFGLELIICGLEKQLKAESGS

SEQ ID NO: 1425 - protein, 208 aa, Artificial Sequence
  Sulfonylurea responsive repressor
MGSRLDKSKVINSALELLNEVGIEGLTTRKLAQKLGVEQPTLYWHVKNKRALLDAMAIEMLDRHATHYLPLEGESWQDFLRNKAKSMRNALLSHRDGAKVALGTGFTEQQYETAENSLAFLTQQGFSLENALYAMQAVGIYTLGCVLLDQELQVAKEERETPTTDSMPPLVRQALELHDHQGAEPAFLFGLELIISGLEKQLKAESGS

SEQ ID NO: 1426 - protein, 208 aa, Artificial Sequence
  Sulfonylurea responsive repressor
MGSRLDKSKVINSALELLNEVGIEGLTTRKLAQKLGVEQPTLYWHVKNKRALLDAMAIEMFDRHATHYLPLEGESWQDFLRNRAKSMRNALLSHRDGAKVALGTGFTEQQYETAENSLAFLTQQGFSLENALYAFQAVGIYTLGCVLLDQELQVAKEERETPTTDSMPPLVRQALELHDHQGAEPAFLFGLELIISGLEKQLKCESGS

SEQ ID NO: 1427 - protein, 208 aa, Artificial Sequence
  Sulfonylurea responsive repressor
MGSRLDKSKVINSALELLNEVGIEGLTTRKLAQKLGVEQPTLYWHVKNKRALLDAMAIEMLDRHATHYLPLEGESWQDFLRNRAKSMRNALLSHRDGAKVALGTGFTEQQYETMENSLAFLTQQGFSLENALYAMQAVGIYTLGCVLLDQELQVAKEERETPTTDSMPPLVRQAYELRDHQGAEPAFLFGLELIISGLEKQLKCESGS

SEQ ID NO: 1428 - protein, 208 aa, Artificial Sequence
  Sulfonylurea responsive repressor
MGSRLDKSKVINSALELLNEVGIEGLTTRKLAQKLGVEQPTLYWHVKNKRALLDAMAIEMLDRHATHYCPLEGESWQDFLRNKAKSMRNALLSHRDGAKVALGTGFTEQQYETMENSLAFLTQQGFSLENALYAFQAVGIYTLGCVLLDQELQVAKEERETPTTDSMPPLVRQAYELKDHQGAEPAFLFGLELIICGLEKQLKAESGS

SEQ ID NO: 1429 - protein, 208 aa, Artificial Sequence
  Sulfonylurea responsive repressor
MGSRLDKSKVINSALELLNEVGIEGLTTRKLAQKLGVEQPTLYWHVKNKRALLDAMAIEMFDRHDTHYCPLEGESCQDFLRNKAKSMRNALLSHRDGAKVALGTGFTEQQYETAENSLAFLTQQGFSLENALYAFQAVGIYTLGCVLLDQELQVAKEERETPTTDSMPPLVRQAIELHDHQGAEPAFLFGLELIISGLEKQLKCESGS

SEQ ID NO: 1430 - protein, 208 aa, Artificial Sequence
  Sulfonylurea responsive repressor
MGSRLDKSKVINSALELLNEVGIEGLTTRKLAQKLGVEQPTLYWHVKNKRALLDAMAIEMLDRHATHYCPLEGESWQDFLRNKAKSMRNALLSHRDGAKVALGTGFTEQQYETMENSLAFLTQQGFSLENALYAMQAVGIYTLGCVLLDQELQVAKEERETPTTDSMPPLVRQAYELKDHQGAEPAFLFGFELIICGLEKQLKCESGS

SEQ ID NO: 1431 - protein, 208 aa, Artificial Sequence
  Sulfonylurea responsive repressor
MGSRLDKSKVINSALELLNEVGIEGLTTRKLAQKLGVEQPTLYWHVKNKRALLDAMAIEMFDRHDTHYCPLEGESWQDFLRNNAKSRRNALLSHRDGAKVALGTGFTEQQYETMENSLAFLTQQGFSLENALYAFQAVGIYTLGCVLLDQELQVAKEERETPTTDSMPPLVRQAYQLKDHQGAEPAFLFGLELIICGLEKQLKAESGS

SEQ ID NO: 1432 - protein, 207 aa, Artificial Sequence
  Sulfonylurea responsive repressor
MGSRLDKSKVINSALELLNEVGIEGLTTRKLAQKLGVEQPTLYWHVKNKRALLDAMAIEMLDRHKTHYCPLEGESWQDFLRNKAKSMRNALLSHRDGAKVALGTGFTEQQYETAENCLAFLTQQGFSLENALYAFQAVGIYTLGCVLLDQELQVAKEERETPTTDSMPPLVRQAFELKDHQGAEPAFLFGLELIICGLEKQLCESGS

SEQ ID NO: 1433 - protein, 208 aa, Artificial Sequence
  Sulfonylurea responsive repressor
MGSRLDKSKVINSALELLNEVGIEGLTTRKLAQKLGVEQPTLYWHVKNKRALLDAMAIEMLDRHKTHYLPLEGESWQDFLRNKAKSMRNALLSHRDGAKVALGTGFTEQQYETAENSLAFLTQQGFSLENALYAFQAVGIYTLGCVLLDQELQVAKEERETPTTDSMPPLVRQALELHDHQGAEPAFLFGLELIISGLEKQLKAESGS

SEQ ID NO: 1434 - protein, 208 aa, Artificial Sequence
  Sulfonylurea responsive repressor
MGSRLDKSKVINSALELLNEVGIEGLTTRKLAQKLGVEQPTLYWHVKNKRALLDAMAIEMLDRHDTHYCPLEGESWQDFLRNKAKSMRNALLSHRDGAKVALGTGFTEQQYETAENCLAFLTQQGFSLENALYAFQAVGIYTLGCVLLDQELQVAKEERETPTTDSMPPLVRQAIELHDHQGAEPAFLFGLELIISGLEKQLKCESGS

SEQ ID NO: 1435 - protein, 208 aa, Artificial Sequence
  Sulfonylurea responsive repressor
MGSRLDKSKVINSALELLNEVGIEGLTTRKLAQKLGVEQPTLYWHVKNKRALLDAMAIEMFDRHKTHYCPLEGESWQDFLRNRAKSMRNALLSHRDGAKVALGTGFTEQQYETMENSLAFLTQQGFSLENALYAMQAVGIYTLGCVLLDQELQVAKEERETPTTDSMPPLVRQAYELKDHQGAEPAFLFGLELIICGLEKQLKAESGS

SEQ ID NO: 1436 - protein, 208 aa, Artificial Sequence
  Sulfonylurea responsive repressor
MGSRLDKSKVINSALELLNEVGIEGLTTRKLAQKLGVEQPTLYWHVKNKRALLDAMAIEMFDRHATHYLPLEGESWQDFLRNRAKSMRNALLSHRDGAKVALGTGFTEQQYETMENSLAFLTQQGFSLENALYAMQAVGIYTLGCVLLDQELQVAKEERETPTTDSMPPLVRQAIELHDHQGAEPAFLFGLELIISGLEKQLKAESGS

SEQ ID NO: 1437 - protein, 208 aa, Artificial Sequence
  Sulfonylurea responsive repressor
MGSRLDKSKVINSALELLNEVGIEGLTTRKLAQKLGVEQPTLYWHVKNKRALLDAMAIEMFDRHKTHYLPLEGESWQDFLRNNAKSRRNALLSHRDGAKVALGTGFTEQQYETMENSLAFLTQQGFSLENALYAMQAVGIYTLGCVLLDQELQVAKEERETPTTDSMPPLVRQAYELKDHQGAEPAFLFGLELIICGLEKQLKCESGS

SEQ ID NO: 1438 - protein, 208 aa, Artificial Sequence
  Sulfonylurea responsive repressor
MGSRLDKSKVINSALELLNEVGIEGLTTRKLAQKLGVEQPTLYWHVKNKRALLDAMAIEMFDRHATHYLPLEGESWQDFLRNNAKSRRNALLSHRDGAKVALGTGFTEQQYETMENSLAFLTQQGFSLENALYAFQAVGIYTLGCVLLDQELQVAKEERETPTTDSMPPLVRQAYELKDHQGAEPAFLFGLELIICGLEKQLKCESGS

SEQ ID NO: 1439 - protein, 207 aa, Artificial Sequence
  Sulfonylurea responsive repressor
MGSRLDKSKVINSALELLNEVGIEGLTTRKLAQKLGVEQPTLYWHVKNKRALLDAMAIEMFDRHDTHYLPLEGESWQDFLRNKAKSMRNALLSHRDGAKVALGTGFTEQQYETMENSLAFLTQQGFSLENALYAMQAVGIYTLGCVLLDQELQVAKEERETPTTDSMPPLVRQAIELHDHQGAEPAFLFGLEQIISGLEKQLKAESV

SEQ ID NO: 1440 - protein, 208 aa, Artificial Sequence
  Sulfonylurea responsive repressor
MGSRLDKSKVINSALELLNEVGIEGLTTRKLAQKLGVEQPTLYWHVKNKRALLDAMAIEMFDRHDTHYCPLEGESWQDFLRNNAKSRRNALLSHRDGAKVALGTGFTEQQYETMENSLAFLTQQGFSLENALYAFQAVGIYTLGCVLLDQELQVAKEERETPTTDSMPPLVRQAYELKDHQGAEPAFLFGLELIISGLEKQLKCESGS

SEQ ID NO: 1441 - protein, 208 aa, Artificial Sequence
  Sulfonylurea responsive repressor
MGSRLDKSKVINSALELLNEVGIEGLTTRKLAQKLGVEQPTLYWHVKNKRALLDAMAIEMLDRHDTHYCPLEGESWQDFLRNKAKSMRNALLSHRDGAKVALGTGFTEQQYETAENSLAFLTQQGFSLENALYAFQAVGIYTLGCVLLDQELQVAKEERETPTTDSMPPLVRQALELHDHQGAEPAFLFGLELIISGLEKQLKCESGS

SEQ ID NO: 1442 - protein, 208 aa, Artificial Sequence
  Sulfonylurea responsive repressor
MGSRLDKSKVINSALELLNEVGIEGLTTRKLAQKLGVEQPTLYWHVKNKRALLDAMAIEMLDRHKTHYCPLEGESWQDFLRNKAKSMRNALLSHRDGAKVALGTGFTEQQYETAENSLAFLTQQGFSLENALYAFQAVGIYTLGCVLLDQELQVAKEERETPTTESMPPLVRQAYELKDHQGAEPAFLFGLELIISGLEKQLKCESGS

SEQ ID NO: 1443 - protein, 208 aa, Artificial Sequence
  Sulfonylurea responsive repressor
MGSRLDKSKVINSALELLNEVGIEGLTTRKLAQKLGVEQPTLYWHVKNKRALLDAMAIEMFDRHDTHYCPLEGESWQDFLRNKAKSMRNALLSHRDGAKVALGTGFTEQQYETAENCLAFLTQQGFSLENALYAFQAVGIYTLGCVLLDQELQVAKEERETPTTDSMPPLVRQAYELRDHQGAEPAFLFGLELIISGLEKQLKAGKWV

SEQ ID NO: 1444 - protein, 208 aa, Artificial Sequence
  Sulfonylurea responsive repressor
MGSRLDKSKVINSALELLNEVGIEGLTTRKLAQKLGVEQPTLYWHVKNKRALLDAMAIEMLDRHKTHYCPLEGESWQDFLRNRAKSMRNALLSHRDGAKVALGTGFTEQQYETMENSLAFLTQQGFSLENALYAFQAVGIYTLGCVLLDQELQVAKEERETPTTDSMPPLVRQAYELKDHQGAEPAFLFGLELIISGLEKQLKCESGS

SEQ ID NO: 1445 - protein, 208 aa, Artificial Sequence
  Sulfonylurea responsive repressor
MGSRLDKSKVINSALELLNEVGIEGLTTRKLAQKLGVEQPTLYWHVKNKRALLDAMAIEMFDRHDTHYCPLEGESWQDFLRNKAKSMRNALLSHRDGAKVALGTGFTEQQYETAENCLAFLTQQGFSLENALYAFQAVGIYTLGCVLLDQELQVAKEERETPTTDSMPPLVRQAIELHDHQGAEPAFLFGLELIISGLEKQLKAESGS

SEQ ID NO: 1446 - protein, 200 aa, Artificial Sequence
  Sulfonylurea responsive repressor
  VARIANT 84, 111, 168, 171, 172, 184, 188: Xaa = Any Amino Acid
MGSRLDKSKVINSALELLNEVGIEGLTTRKLAQKLGVEQPTLYWHVKNKRALLDAMAIEMLDRHKTHYLSFGRGKLARLLEEQXVHEKCFAQSPWSQGRSRYGLHGATVNXGELSCLPDTTRFLPERPLRNASCWDLHSGLRLAGSRAASRGGEGNTYYYAATGSTSXRTXXSPRCRASLPVRXTDHXWIGEAAEGRKWV

SEQ ID NO: 1447 - protein, 206 aa, Artificial Sequence
  Sulfonylurea responsive repressor
MGSRLDKSKVINSALELLNEVGIEGLTTRKLAQKLGVEQPTLYWHVKNKRALLDAMAIEMFDRHDTHYLPLEGESWQDFLRNKAKSMRNALLSHRDGAKVALGTGFTEQQYETMENSLAFLTQQGFSLENALYAFQAVGIYTLGCVLLDQELQVAKEERETPTTDSMPPLVRQAYELKDHQGAEPAFLFGLELIICGLQLKCESGS

SEQ ID NO: 1448 - protein, 208 aa, Artificial Sequence
  Sulfonylurea responsive repressor
MGSRLDKSKVINSALELLNEVGIEGLTTRKLAQKLGVEQPTLYWHVKNKRALLDAMAIEMLDRHDTHYLPLEGESWQDFLRNNAKSRRNALLSHRDGAKVALGTGFTEQQYETMENSLAFLTQQGFSLENALYAFQAVGIYTLGCVLLDQELQVAKEERETPTTDSMPPLVRQAYELKDHQGAEPAFLFGLELIICGLEKQLKCESGS

SEQ ID NO: 1449 - protein, 208 aa, Artificial Sequence
  Sulfonylurea responsive repressor
MGSRLDKSKVINSALELLNEVGIEGLTTRKLAQKLGVEQPTLYWHVKNKRALLDAMAIEMMDRHKTHYCPLEGESWQDFLRNKAKSRRNALLSHRDGAKVCLGTGFTEQQYETAENWLAFLTQQGFSLENALYAMQAVGIYTLGCVLLDQELQVAKEERETPTTDSMPPLVRQAYELKDHQGAEPAFLFGLELIISGLEKQLKCESGS

SEQ ID NO: 1450 - protein, 208 aa, Artificial Sequence
  Sulfonylurea responsive repressor
MGSRLDKSKVINSALELLNEVGIEGLTTRKLAQKLGVEQPTLYWHVKNKRALLDAMAIEMLDRHDTHYLPLEGESWQDFLRNNAKSRRNALLSHRDGAKVALGTGFTEQQYETMENSLAFLTQQGFSLENALYAMQAVGIYTLGCVLLDQELQVAKEERETPTTDSMPPLVRQAYELKDHQGAEPAFLFGLELIICGLEKQLKAESGS

SEQ ID NO: 1451 - protein, 208 aa, Artificial Sequence
  Sulfonylurea responsive repressor
MGSRLDKSKVINSALELLNEVGIEGLTTRKLAQKLGVEQPTLYWHVKNKRALLDAMAIEMLDRHATHYCPLEGESWQDFLRNKAKSRRNALLSHRDGAKVALGTGFTEQQYETMENSLAFLTQQGFSLENALYAMQAVGIYTLGCVLLDQELQVAKEERETPTTDSMPPLVRQAYELKDHQGAEPAFLFGLELIICGLEKQLKCESGS

SEQ ID NO: 1452 - protein, 208 aa, Artificial Sequence
  Sulfonylurea responsive repressor
MGSRLDKSKVINSALELLNEVGIEGLTTRKLAQKLGVEQPTLYWHVKNKRALLDAMAIEMLDRHATHYLPLEGESWQDFLRNNAKSRRNALLSHRDGAKVCLGTGFTEQQYETMENSLAFLTQQGFSLENALYAMQAVGIYTLGCVLLDQELQVAKEERETPTTDSMPPLVRQAYELKDHQGAEPAFLFGLELIICGLEKQLKCESGS

SEQ ID NO: 1453 - protein, 208 aa, Artificial Sequence
  Sulfonylurea responsive repressor
MGSRLDKSKVINSALELLNEVGIEGLTTRKLAQKLGVEQPTLYWHVKNKRALLDAMAIEMLDRHATHYCPLEGESWQDFLRNKAKSRRNALLSHRDGAKVALGTGFTEQQYETMENSLAFLTQQGFSIENALYAMQAVGIYTLGCVLLDQELQVAKEERETPTTDSMPPLVRQAYELRDHQGAEPAFLFGLELIICGLEKQLKCESGS

SEQ ID NO: 1454 - protein, 208 aa, Artificial Sequence
  Sulfonylurea responsive repressor
MGSRLDKSKVINSALELLNEVGIEGLTTRKLAQKLGVEQPTLYWHVKNKRALLDAMAIEMLDRHATHYLPLEGESWQDFLRNRAKSMRNALLSHRDGAKVALGTGFTEQQYETMENCLAFLTQQGFSLENALYAFQAVGIYTLGCVLLDQELQVAKEERETPTTDSMPPLVRQAYELKDHQGAEPAFLFGLELIISGLEKQLKAESGS

SEQ ID NO: 1455 - protein, 206 aa, Artificial Sequence
  Sulfonylurea responsive repressor
MGSRLDKSKVINSALELLNEVGIEGLTTRKLAQKLGVEQPTLYWHVKNKRALLDAMAIEMLDRHDTHYCPLEGESWQDFLRNKAKSMRNALLSHRDGAKVCLGTGFTEQQYETAENSLAFLTQQGFSLENALYAGQAVGIYTLGCVLLDQELQVAKEERETPTTDSMPPLVRQALELHDHQGAEPAFLFGLELIISGLEKHRQKWV

SEQ ID NO: 1456 - protein, 208 aa, Artificial Sequence
  Sulfonylurea responsive repressor
MGSRLDKSKVINSALELLNEVGIEGLTTRKLAQKLGVEQPTLYWHVKNKRALLDAMAIEMLDRHATHYCPLEGESWQDFLRNKAKSMRNALLSHRDGAKVALGTGFTEQQYETMENSLAFLTQQGFSLENALYAFQAVGIYTLGCVLLDQELQVAKEERETPTTDSMPPLVRQAYELKDHQGAEPAFLFGLELIISGLEKQLKAESGS

SEQ ID NO: 1457 - protein, 208 aa, Artificial Sequence
  Sulfonylurea responsive repressor
MGSRLDKSKVINSALELLNEVGIEGLTTRKLAQKLGVEQPTLYWHVKNKRALLDAMAIEMFDRHKTHYCPLEGESWQDFLRNNAKSRRNALLSHRDGAKVALGTGFTEQQYETAENCLAFLTQQGFSLENALYAMQAVGIYTLGCVLLDQELQVAKEERETPTTDSMPPLVRQAYELKDHQGAEPAFLFGLELIICGLEKQLKAESGS

SEQ ID NO: 1458 - protein, 208 aa, Artificial Sequence
  Sulfonylurea responsive repressor
MGSRLDKSKVINSALELLNEVGIEGLTTRKLAQKLGVEQPTLYWHVKNKRALLDAMAIDMLDRHKTHYCPLEGESWQDFLRNRAKSMRNALLSHRDGAKVALGTGFTEQQYETMENCLAFLTQQGFSLENALYAMQAVGIYTLGCVLLDQELQVAKEERETPTTDSMPPLVRQAYELRDHQGAEPAFLFGLELIISGLEKQLKAESGS

SEQ ID NO: 1459 - protein, 208 aa, Artificial Sequence
  Sulfonylurea responsive repressor
MGSRLDKSKVINSALELLNEVGIEGLTTRKLAQKLGVEQPTLYWHVKNKRALLDAMAIEMLDRHATHYLPLEGESWQDFLRNRAKSMRNALLSHRDGAKVALGTGFTEQQYETAENSLAFLTQQGFSLENALYAFQAVGIYTLGCVLLDQELQVAKEERETPTTDSMPPLVRQALELHDHQGAEPAFLFGLELIICGLEKQLKAESGS

SEQ ID NO: 1460 - protein, 208 aa, Artificial Sequence
  Sulfonylurea responsive repressor
MGSRLDKSKVINSALELLNEVGIEGLTTRKLAQKLGVEQPTLYWHVKNKRALLDAMAIEMFDRHDTHYCPLEGESWQDFLRNKAKSMRNALLSHRDGAKVALGTGFTEQQYETAENCLAFLTQQGFSLENALYAFQAVGIYTLGCVLLDQELQVAKEERETPTTDSMPPLVRQALELHDHQGAEPAFLFGLELIICGLEKQLKCESGS

SEQ ID NO: 1461 - protein, 208 aa, Artificial Sequence
  Sulfonylurea responsive repressor
MGSRLDKSKVINSALELLNEVGIEGLTTRKLAQKLGVEQPTLYWHVKNKRALLDAMAIEMLDRHKTHYCPLEGESWQDFLRNKAKSMRNALLSHRDGAKVALGTGFTEQQYETMENSLAFLTQQGFSLENALYAMQAVGIYTLGCVLLDQELQVAKEERETPTTDSMPPLVRQAYELKDHQGAEPAFLFGLELIISGLEKQLKCESGS

SEQ ID NO: 1462 - protein, 208 aa, Artificial Sequence
  Sulfonylurea responsive repressor
MGSRLDKSKVINSALELLNEVGIEGLTTRKLAQKLGVEQPTLYWHVKNKRALLDAMAIEMLDRHATHYCPLEGESWQDFLRNRAKSMRNALLSHRDGAKVALGTGFTEQQYETMENSLAFLTQQGFSLENALYAFQAVGIYTLGCVLLDQELQVAKEERETPTTDSMPPLVRQAYELKDHQGAEPAFLFGLELIICGLEKQLKCESGS

SEQ ID NO: 1463 - protein, 208 aa, Artificial Sequence
  Sulfonylurea responsive repressor
MGSRLDKSKVINSALELLNEVGIEGLTTRKLAQKLGVEQPTLYWHVKNKRALLDAMAIEMFDRHKTHYLPLEGESWQDFLRNRAKSMRNALLSHRDGAKVALGTGFTEQQYETAENSLAFLTQQGFSLENALYAFQAVGIYTLGCVLLDQELQVAKEERETPTTDSMPPLVRQAIELHDHQGAEPAFLFGLELIISGLEKQLKCESGS

SEQ ID NO: 1464 - protein, 208 aa, Artificial Sequence
  Sulfonylurea responsive repressor
MGSRLDKSKVINSALELLNEVGIEGLTTRKLAQKLGVEQPTLYWHVKNKRALLDAMAIEMFDRHAIHYCPLEGESWQDFLRNNAKSRRNALLRHRDGAKVALGTGFTEQQYETAENSLAFLTQQGFSLENALYAFQAVGIYTLGCVLLDQELQVAKEERETPTTDSMPPLVRQAYELRDHQGAEPAFLFGLELIICGLEKQLKCESGS

SEQ ID NO: 1465 - protein, 208 aa, Artificial Sequence
  Sulfonylurea responsive repressor
MGSRLDKSKVINSALELLNEVGIEGLTTRKLAQKLGVEQPTLYWHVKNKRALLDAMAIEMLDRHKTHYCPLEGESWQDFLRNKAKSMRNALLSHRDGAKVCLGTGFTEQQYETMENSLAFLTQQGFSLENALYAMQAVGIYTLGCVLLDQELQVAKEERETPTTDSMPPLVRQAYELKDHQGAEPAFLFGLELIICGLEKQLKAESGS

SEQ ID NO: 1466 - protein, 208 aa, Artificial Sequence
  Sulfonylurea responsive repressor
MGSRLDKSKVINSALELLNEVGIEGLTTRKLAQKLGVEQPTLYWHVKNKRALLDAMAIEMFDRHDTHYLPLEGKSWQDFLRNRAKSMRNALLSHRDGAKVALGTGFTEQQYETAENSLAFLTQQGFSLENALYAFQAVGIYTLGCVLLDQELQVAKEERETPTTDSMPPLVRQAYELHDHQGAEPAFLFGLELIISGLEKQLKCESGS

SEQ ID NO: 1467 - protein, 207 aa, Artificial Sequence
  Sulfonylurea responsive repressor
MARLDKSKVINSALELLNEVGIEGLTTRKLAQKLGVEQPTLYWHVKNKRALLDAMAIEMLDRHKTHYCPLEGESWQDFLRNKAKSMRNALLSHRDGAKVALGTGFTEQQYETAENSLAFLTQQGFSLENALYAGQAVGIYTLGCVLLDQELQVAKEERETPTTDSMPPLVRQAYELRDHQGAEPAFLFGLELIISGLEKQLKAESGS

SEQ ID NO: 1468 - protein, 207 aa, Artificial Sequence
  Sulfonylurea responsive repressor
MARLDKSKVINSALELLNEVGIEGLTTRKLAQKLGVEQPTLYWHVKNKRALLDAMAIEMFDRHATHYLPLEGESWQDFLRNKAKSMRNALLSHRDGAKVALGTGFTEQQYETMENSLAFLTQQGFSLENALYAMQAVGIYTLGCVLLDQELQVAKEERETPTTDSMPPLVRQAIELHDHQGAEPAFLFGLELIISGLEKQLKAESGS

SEQ ID NO: 1469 - protein, 207 aa, Artificial Sequence
  Sulfonylurea responsive repressor
MARLDKSKVINSALELLNEVGIEGLTTRKLAQKLGVEQPTLYWHVKNKRALLDAMAIEMFDRHATHYLPLEGESWQDFLRNKAKSMRNALLSHRDGAKVALGTGFTEQQYETMENCLAFLTQQGFSLENALYAMQAVGIYTLGCVLLDQELQVAKEERETPTTDSMPPLVRQAYELKDHQGAEPAFLFGLELIICGLEKQLKAESGS

SEQ ID NO: 1470 - protein, 207 aa, Artificial Sequence
  Sulfonylurea responsive repressor
MARLDKSKVINSALELLNEVGIEGLTTRKLAQKLGVEQPTLYWHVKNKRALLDAMAIEMLDRHKTHYCPLEGESWQDFLRNKAKSMRNALLSHRDGAKVALGTGFTEQQYETMENCLAFLTQQGFSLENALYAMQAVGIYTLGCVLLDQELQVAKEERETPTTDSMPPLVRQAYELRDHQGAEPAFLFGLELIICGLEKQLKCESGS

SEQ ID NO: 1471 - protein, 207 aa, Artificial Sequence
  Sulfonylurea responsive repressor
MARLDKSKVINSALELLNEVGIEGLTTRKLAQKLGVEQPTLYWHVKNKRALLDAMAIEMLDRHATHYLPLEGESWQDFLRNKAKSMRNALLSHRDGAKVALGTGFTEQQYETAENSLAFLTQQGFSLENALYAFQAVGIYTLGCVLLDQELQVAKEERETPTTDSMPPLVRQAIELRDHQGAEPAFLFGLELIISGLEKQLKCESGS

SEQ ID NO: 1472 - protein, 207 aa, Artificial Sequence
  Sulfonylurea responsive repressor
MARLDKSKVINSALELLNEVGIEGLTTRKLAQKLGVEQPTLYWHVKNKRALLDAMAIEMFDRHATHYCPLEGESWQDFLRNKAKSMRNALLRHRDGAKVALGTGFTEQQYETAENCLAFLTQQGFSLENALYAFQAVGIYTLGCVLLDQELQVAKEERETPTTDSMPPLVRQAIELKDHQGAEPAFLFGLELIICGLEKQLKCESGS

SEQ ID NO: 1473 - protein, 207 aa, Artificial Sequence
  Sulfonylurea responsive repressor
MARLDKSKVINSALELLNEVGIEGLTTRKLAQKLGVEQPTLYWHVKNKRALLDAMAIEMFDRHKTHYLPLEGESWQDFLRNRAKSMRNALLSHRDGAKVALGTGFTEQQYETMENSLAFLTQQGFSLENALYAMQAVGIYTLGCVLLDQELQVAKEERETPTTDSMPPLVRQAIELKDHQGAEPAFLFGLELIISGLEKQLKAESGS

SEQ ID NO: 1474 - protein, 207 aa, Artificial Sequence
  Sulfonylurea responsive repressor
MARLDKSKVINSALELLNEVGIEGLTTRKLAQKLGVEQPTLYWHVKNKRALLDAMAIEMFDRHDTHYLPLEGESWQDFLRNKAKSMRNALLSHRDGAKVALGTGFTEQQYETAENCLAFLTQQGFSLENALYAFQAVGIYTLGCVLLDQELQVAKEERETPTTDSMPPLVRQAYELRDHQGAEPAFLFGLELIICGLEKQLKCESGS

SEQ ID NO: 1475 - protein, 207 aa, Artificial Sequence
  Sulfonylurea responsive repressor
MARLDKSKVINSALELLNEVGIEGLTTRKLAQKLGVEQPTLYWHVKNKRALLDAMAIEMFDRHATHYCPLEGESWQDFLRNRAKSMRNALLSHRDGAKVCLGTGFTEQQYETMENSLAFLTQQGFSLENALYAMQAVGIYTLGCVLLDQELQVAKEERETPTTDSMPPLVRQAFELKDHQGAEPAFLFGLELIICGLEKQLKCESGS

SEQ ID NO: 1476 - protein, 207 aa, Artificial Sequence
  Sulfonylurea responsive repressor
MARLDKSKVINSALELLNEVGIEGLTTRKLAQKLGVEQPTLYWHVKNKRALLDAMAIEMLDRHATHYLPLEGESWQDFLRNKAKSMRNALLSHRDGAKVALGTGFTEQQYETMENSLAFLTQQGFSLENALYAMQAVGIYTLGCVLLDQELQVAKEERETPTTDSMPPLVRQAYELRDHQGAEPAFLFGLELIISGLEKQLKCESGS

SEQ ID NO: 1477 - protein, 207 aa, Artificial Sequence; identical to SEQ ID NO: 863
  Sulfonylurea responsive repressor

SEQ ID NO: 1478 - protein, 207 aa, Artificial Sequence
  Sulfonylurea responsive repressor
MARLDKSKVINSALELLNEVGIEGLTTRKLAQKLGVEQPTLYWHVKNKRALLDAMAIEMLDRHKTHYLPLEGESWQDFLRNNAKSMRNALLSHRDGAKVCLGTGFTEQQYETAENWLAFLTQQGFSLENALYAFQAVGIYTLGCVLLDQELQVAKEERETPTTDSMPPLVRQALELHDHQGAEPAFLFGLELIISGLEKQLKAESGS

SEQ ID NO: 1479 - protein, 207 aa, Artificial Sequence
  Sulfonylurea responsive repressor
MARLDKSKVINSALELLNEVGIEGLTTRKLAQKLGVEQPTLYWHVKNKRALLDAMAIEMFDRHKTHYCPLEGESWQDFLRNRAKSMRNALLSHRDGAKVALGTGFTEQQYETAENCLAFLTQQGFSLENALYAFQAVGIYTLGCVLLDQELQVAKEERETPTTDSMPPLVRQAIELHDHQGAEPAFLFGLELIICGLEKQLKCESGS

SEQ ID NO: 1480 - protein, 207 aa, Artificial Sequence
  Sulfonylurea responsive repressor
MARLDKSKVINSALELLNEVGIEGLTTRKLAQKLGVEQPTLYWHVKNKRALLDAMAIEMFDRHATHYLPLEGESWQDFLRNNAKSRRNALLSHRDGAKVALGTGFTEQQYETMENSLAFLTQQGFSLENALYAMQAVGIYTLGCVLLDQELQVAKEERETPTTDSMPPLVRQAYELRDHQGAEPAFLFGLELIICGLEKQLKAESGS

SEQ ID NO: 1481 - protein, 207 aa, Artificial Sequence
  Sulfonylurea responsive repressor
MARLDKSKVINSALELLNEVGIEGLTTRKLAQKLGVEQPTLYWHVKNKRALLDAMAIEMLDRHKTHYCPLEGESWQDFLRNKAKSMRNALLSHRDGAKVALGTGFTEQQYETMENSLAFLTQQGFSLENALYAFQAVGIYTLGCVLLDQELQVAKEERETPTTDSMPPLVRQAYELRDHQGAEPAFLFGLELIISGLEKQLKAESGS

SEQ ID NO: 1482 - protein, 207 aa, Artificial Sequence
  Sulfonylurea responsive repressor
MARLDKSKVINSALELLNEVGIEGLTTRKLAQKLGVEQPTLYWHVKNKRALLDAMAIEMLDRHATHYCPLEGESWQDFLRNNAKSMRNALLSHRDGAKVALGTGFTEQQYETMENSLAFLTQQGFSLENALYAMQAVGIYTLGCVLLDQELQVAKEERETPTTDSMPPLVRQAYELRDHQGAEPAFLFGLELIISGLEKQLKCESGS

SEQ ID NO: 1483 - protein, 207 aa, Artificial Sequence
  Sulfonylurea responsive repressor
MARLDKSKVINSALELLNEVGIEGLTTRKLAQKLGVEQPTLYWHVKNKRALLDAMAIEMFDRHKTHYCPLEGESWQDFLRNRAKSMRNALLSHRDGAKVALGTGFTEQQYETMENCLAFLTQQGFSLENALYAMQAVGIYTLGCVLLDQELQVAKEERETPTTDSMPPLVRQAYELRDHQGAEPAFLFGLELIICGLEKQLKCESGS

SEQ ID NO: 1484 - protein, 207 aa, Artificial Sequence
  Sulfonylurea responsive repressor
MARLDKSKVINSALELLNEVGIEGLTTRKLAQKLGVEQPTLYWHVKNKRALLDAMAIEMLDRHDTHYCPLEGESWQDFLRNKAKSMRNALLSHRDGAKVALGTGFTEQQYETMENCLAFLTQQGFSLENALYAMQAVGIYTLGCVLLDQELQVAKEERETPTTDSMPPLVRQAYELRDHQGAEPAFLFGLELIISGLEKQLKAESGS

SEQ ID NO: 1485 - protein, 207 aa, Artificial Sequence
  Sulfonylurea responsive repressor
MARLDKSKVINSALELLNEVGIEGLTTRKLAQKLGVEQPTLYWHVKNKRALLDAMAIEMLDRHDTHYLPLEGESWQDFLRNKAKSMRNALLSHRDGAKVALGTGFTEQQYETMENCLAFLTQQGFSLENALYAFQAVGIYTLGCVLLDQELQVAKEERETPTTDSMPPLVRQAYELRDHQGAEPAFLFGLELIISGLEKQLKCESGS

SEQ ID NO: 1486 - protein, 207 aa, Artificial Sequence
  Sulfonylurea responsive repressor
MARLDKSKVINSALELLNEVGIEGLTTRKLAQKLGVEQPTLYWHVKNKRALLDAMAIEMFDRHKTHYLPLEGESWQDFLRNRAKSMRNALLSHRDGAKVALGTGFTEQQYETAENSLAFLTQQGFSLENALYAFQAVGIYTLGCVLLDQELQVAKEERETPTTDSMPPLVRQAYELKDHKGAEPAFLFGLELIICGLEKQLKAESGS

SEQ ID NO: 1487 - protein, 207 aa, Artificial Sequence
  Sulfonylurea responsive repressor
MARLDKSKVINSALELLNEVGIEGLTTRKLAQKLGVEQPTLYWHVKNKRALLDAMAIEMLDRHATHYCPLEGESWQDFLRNKAKSMRNALLSHRDGAKVALGTGFTEQQYETAENCLAFLTQQGFSLENALYAFQAVGIYTLGCVLLDQELQVAKEERETPTTDSMPPLVRQAYELRDHQGAEPAFLFGLELIICGLEKQLKAESGS

SEQ ID NO: 1488 - protein, 207 aa, Artificial Sequence
  Sulfonylurea responsive repressor
MARLDKSKVINSALELLNEVGIEGLTTRKLAQKLGVEQPTLYWHVKNKRALLDAMAIEMFDRHATHYCPLEGESWQDFLRNKAKSMRNALLSHRDGAKVALGTGFTEQQYETAENSLAFLTQQGFSLENALYAGQAVGIYTLGCVLLDQELQVAKEERETPTTDSMPPLVRQAYELKDHQGAEPAFLFGLELIICGLEKQLKCESGS

SEQ ID NO: 1489 - protein, 207 aa, Artificial Sequence
  Sulfonylurea responsive repressor
MARLDKSKVINSALELLNEVGIEGLTTRKLAQKLGVEQPTLYWHVKNKRALLDAMAIEMFDRHDTHYLPLEGESWQDFLRNKAKSMRNALLSHRDGAKVALGTGFTEQQYETMENSLAFLTQQGFSLENALYAMQAVGIYTLGCVLLDQELQVAKEERETPTTDSMPPLVRQAYELRDHQGAEPAFLFGLELIISGLEKQLKAESGS

SEQ ID NO: 1490 - protein, 207 aa, Artificial Sequence
  Sulfonylurea responsive repressor
MARLDKSKVINSALELLNEVGIEGLTTRKLAQKLGVEQPTLYWHVKNKRALLDAMAIEMFDRHKTHYCPLEGESWQDFLRNRAKARRNALLSHRDGAKVALGTGFTEQQYETAENWLAFLTQQGFSLENALYAMQAVGIYTLGCVLLDQELQVAKEERETPTTDSMPPLVRQAYELRDHQGAEPAFLFGLELIISGLEKQLKCESGS

SEQ ID NO: 1491 - protein, 207 aa, Artificial Sequence
  Sulfonylurea responsive repressor
MARLDKSKVINSALELLNEVGIEGLTTRKLAQKLGVEQPTLYWHVKNKRALLDAMAIEMLDRHATHYCPLEGESWQDFLRNRAKSMRNALLSHRDGAKVALGTGFTEQQYETMENCLAFLTQQGFSLENALYAMQAVGIYTLGCVLLDQELQVAKEERETPTTDSMPPLVRQAYELRDHQGAEPAFLFGLELIICGLEKQLKCESGS

SEQ ID NO: 1492 - protein, 207 aa, Artificial Sequence
  Sulfonylurea responsive repressor
MARLDKSKVINSALELLNEVGIEGLTTRKLAQKLGVEQPTLYWHVKNKRALLDAMAIEMFDRHATHYLPLEGESWQDFLRNRAKSMRNALLSHRDGAKVALGTGFTEQQYETAENCLAFLTQQGFSLENALYAFQAVGIYTLGCVLLDQELQVAKEERETPTTDSMPPLVRQAFELRDHQGAEPAFLFGLELIICGLEKQLKAESGS

SEQ ID NO: 1493 - protein, 207 aa, Artificial Sequence
  Sulfonylurea responsive repressor
MARLDKSKVINSALELLNEVGIEGLTTRKLAQKLGVEQPTLYWHVKNKRALLDAMAIEMLDRHKTHYLPLEGESWQDFLRNKAKSMRNALLSHRDGAKVALGTGFTEQQYETMENSLAFLTQQGFSLENALYAMQAVGIYTLGCVLLDQELQVAKEERETPTTDSMPPLVRQAYELRDHQGAEPAFLFGLELIISGLEKQLKCESGS

SEQ ID NO: 1494 - protein, 207 aa, Artificial Sequence
  Sulfonylurea responsive repressor
MARLDKSKVINSALELLNEVGIEGLTTRKLAQKLGVEQPTLYWHVKNKRALLDAMAIEMLDRHKTHYCPLEGESWQDFLRNRAKSMRNALLSHRDGAKVCLGTGFTEQQYETMENSLAFLTQQGFSLENALYAFQAVGIYTLGCVLLDQELQVAKEERETPTTDSMPPLVRQAYELRDHQGAEPAFLFGLELIISGLEKQLKAESGS

SEQ ID NO: 1495 - protein, 205 aa, Artificial Sequence
  Sulfonylurea responsive repressor
MARLDKSKVINSALELLNEVGIEGLTTRKLAQKLGVEQPTLYWHVKNKRALLDAMAIEMFDRHKTHYLPLEGESWQDFLRNRAKSMRNALLSHRDGAKVALGTGFTEQQYETMENSLAFLTQQGFSLENALYAMQAVGIYTLGCVLLDQELQVAKEERETPTTDSMPPLVRQAIELHDHQGAEPAFLFGLELIISGLEKQQVKWV

SEQ ID NO: 1496 - protein, 207 aa, Artificial Sequence
  Sulfonylurea responsive repressor
MARLDKSKVINSALELLNEVGIEGLTTRKLAQKLGVEQPTLYWHVKNKRALLDAMAIEMLDRHATHYCPLEGESWQDFLRNKAKSMRNALLSHRDGAKVALGTGFTEQQYETMENSLAFLTQQGFSLENALYAMQAVGIYTLGCVLLDQELQVAKEERETPTTDSMPPLVRQAYELRDHQGAEPAFLFGLELIICGLEKQLKCESGS

SEQ ID NO: 1497 - protein, 207 aa, Artificial Sequence; identical to SEQ ID NO: 405
  Sulfonylurea responsive repressor

SEQ ID NO: 1498 - protein, 207 aa, Artificial Sequence
  Sulfonylurea responsive repressor
MARLDKSKVINSALELLNEVGIEGLTTRKLAQKLGVEQPTLYWHVKNKRALLDAMAIEMLDRHKTHYLPLEGESWQDFLRNKAKSMRNALLSHRDGAKVALGTGFTEQQYETAENCLAFLTQQGFSLENALYAFQAVGIYTLGCVLLDQELQVAKEERETPTTDSMPPLVRQALELKDHQGAEPAFLFGLELIISGLEKQLKCESGS

SEQ ID NO: 1499 - protein, 207 aa, Artificial Sequence
  Sulfonylurea responsive repressor
MARLDKSKVINSALELLNEVGIEGLTTRKLAQKLGVEQPTLYWHVKNKRALLDAMAIEMFDRHDTHYLPLEGESWQDFLRNKAKSMRNALLSHRDGAKVALGTGFTEQQYETMENSLAFLTQQGFSLENALYAMQAVGIYTLGCVLLDQELQVAKEERETPTTDSMPPLVRQAYELRDHKGAEPAFLFGLELIICGLEKQLKCESGS

SEQ ID NO: 1500 - protein, 207 aa, Artificial Sequence
  Sulfonylurea responsive repressor
MARLDKSKVINSALELLNEVGIEGLTTRKLAQKLGVEQPTLYWHVKNKRALLDAMAIEMFDRHKTHYCPLEGESWQDFLRNRAKSMRNALLSHRDGAKVALGTGFTEQQYETAENCLAFLTQQGFSLENALYAFQAVGIYTLGCVLLDQELQVAKEERETPTTDSMPPLVRQAIELHDHQGAEPAFLFGLELIISGLEKQLKAESGS

SEQ ID NO: 1501 - protein, 207 aa, Artificial Sequence
  Sulfonylurea responsive repressor
MARLDKSKVINSALELLNEVGIEGLTTRKLAQKLGVEQPTLYWHVKNKRALLDAMAIEMFDRHKTHYCPLEGESWQDFLRNRAKSMRNALLSHRDGAKVALGTGFTEQQYETMENCLAFLTQQGFSLENALYAMQAVGIYTLGCVLLDQELQVAKEERETPTTDSMPPLVRQAYELRDHQGAEPAFLFGLELIISGLEKQLKCESGS

SEQ ID NO: 1502 - protein, 207 aa, Artificial Sequence
  Sulfonylurea responsive repressor
MARLDKSKVINSALELLNEVGIEGLTTRKLAQKLGVEQPTLYWHVKNKRALLDAMAIEMFDRHKTHYLPLEGESWQDFLRNRAKSMRNALLSHRDGAKVALGTGFTEQQYETMENSLAFLTQQGFSLENALYAFQAVGIYTLGCVLLDQELQVAKEERETPTTDSMPPLVRQAYELKDHQGAEPAFLFGLELIICGLEKQLKCESGS

SEQ ID NO: 1503 - protein, 207 aa, Artificial Sequence
  Sulfonylurea responsive repressor
MARLDKSKVINSALELLNEVGIEGLTTRKLAQKLGVEQPTLYWHVKNKRALLDAMAIEMLDRHKTHYLPLEGESWQDFLRNRAKSMRNALLSHRDGAKVCLGTGFTEQQYETMENSLAFLTQQGFSLENALYAFQAVGIYTLGCVLLDQELQVAKEERETPTTDSMPPLVRQAYELRDHQGAEPAFLFGLELIISGLEKQLKCESGS

SEQ ID NO: 1504 - protein, 207 aa, Artificial Sequence
  Sulfonylurea responsive repressor
MARLDKSKVINSALELLNEVGIEGLTTRKLAQKLGVEQPTLYWHVKNKRALLDAMAIEMLDRHKTHYCPLEGESWQDFLRNKAKSMRNALLSHRDGAKVALGTGFTEQQYETMENSLAFLTQQGFSLENALYAFQAVGIYTLGCVLLDQELQVAKEERETPTTDSMPPLVRQAYELRDHQGAEPAFLFGLELIICGLEKQLKCESGS

SEQ ID NO: 1505 - protein, 207 aa, Artificial Sequence
  Sulfonylurea responsive repressor
MARLDKSKVINSALELLNEVGIEGLTTRKLAQKLGVEQPTLYWHVKNKRALLDAMAIEMLDRHKTHYLPLEGESWQDFLRNKAKSMRNALLSHRDGAKVALGTGFTEQQYETMENSLAFLTQQGFSLENALYAMQAVGIYTLGCVLLDQELQVAKEERETPTTDSMPPLVRQAYELRDHQGAEPAFLFGLELIICGLEKQLKAESGS

SEQ ID NO: 1506 - protein, 207 aa, Artificial Sequence
  Sulfonylurea responsive repressor
MARLDKSKVINSALELLNEVGIEGLTTRKLAQKLGVEQPTLYWHVKNKRALLDAMAIEMLDRHKTHYLPLEGESWQDFLRNRAKSMRNALLSHRDGAKVCLGTGFTEQQYETMENCLAFLTQQGFSLENALYAFQAVGIYTLGCVLLDQELQVAKEERETPTTDSMPSLVRQAYELRDHQGAEPAFLFGLELIICGLEKQLKCESGS

SEQ ID NO: 1507 - protein, 207 aa, Artificial Sequence
  Sulfonylurea responsive repressor
MARLDKSKVINSALELLNEVGIEGLTTRKLAQKLGVEQPTLYWHVKNKRALLDAMAIEMFDRHATHYCPLEGESWQDFLRNNAKSRRNALLSHRDGAKVALGTGFTEQQYETMENSLAFLTQQGFSLENALYAMQAVGIYTLGCVLLDQELQVAKEERETPTTDSMPPLVRQAYELRDHQGAEPAFLFGLELIISGLEKQLKCESGS

SEQ ID NO: 1508 - protein, 207 aa, Artificial Sequence; identical to SEQ ID NO: 1502
  Sulfonylurea responsive repressor

SEQ ID NO: 1509 - protein, 205 aa, Artificial Sequence
  Sulfonylurea responsive repressor
MARLDKSKVINSALELLNEVGIEGLTTRKLAQKLGVEQPTLYWHVKNKRALLDAMAIEMFDRHDTHYLPLEGESWQDFLRNKAKSMRNALLSHRDGAKVALGTGFTEQQYETAENCLAFLTQQGFSLENALYAFQAVGIYTLGCVLLDQELQVAKEERETPTTDSMPPLVRQAFELKDHQGAEPAFLFGLELIICGLEKQRQKVG

SEQ ID NO: 1510 - protein, 207 aa, Artificial Sequence
  Sulfonylurea responsive repressor
MARLDKSKVINSALELLNEVGIEGLTTRKLAQKLGVEQPTLYWHVKNKRALLDAMAIEMFDRHKTHYCPLEGESWQDFLRNNAKSMRNALLSHRDGAKVALGTGFTEQQYETMENSLAFLTQQGFSLENALYAMQAVGIYTLGCVLLDQELQVAKEERETPTTDSMPPLVRQAYELKDHQGAEPAFLFGLELIICGLEKQLKAESGS

SEQ ID NO: 1511 - protein, 207 aa, Artificial Sequence
  Sulfonylurea responsive repressor
MARLDKSKVINSALELLNEVGIEGLTTRKLAQKLGVEQPTLYWHVKNKRALLDAMAIEMLDRHKTHYCPLEGESWQDFLRNKAKSMRNALLSHRDGAKVCLGTGFTEQQYETMENSLAFLTQQGFSLENALYAMQAVGIYTLGCVLLDQELQVAKEERETPTTDSMPPLVRQAYELRDHQGAEPAFLFGLELIICGLEKQLKCESGS

SEQ ID NO: 1512 - protein, 207 aa, Artificial Sequence
  Sulfonylurea responsive repressor
MARLDKSKVINSALELLNEVGIEGLTTRKLAQKLGVEQPTLYWHVKNKRALLDAMAIEMLDRHDTHYCPLEGESWQDFLRNKAKSMRNALLSHRDGAKVALGTGFTEQQYETMENSLAFLTQQGFSLENALYAFQAVGIYTLGCVLLDQELQVAKEERETPTTDSMPPLVRQAYELRDHQGAEPAFLFGLELIISGLEKQLKCESGS

SEQ ID NO: 1513 - protein, 207 aa, Artificial Sequence
  Sulfonylurea responsive repressor
MARLDKSKVINSALELLNEVGIEGLTTRKLAQKLGVEQPTLYWHVKNKRALLDAMAIEMLDRHATHYLPLEGESWQDFLRNKAKSMRNALLSHRDGAKVCLGTGFTEQQYETMENSLAFLTQQGFSLENALYAMQAVGIYTLGCVLLDQELQVAKEERETPTTDSMPPLVRQAYELRDHQGAEPAFLFGLELIISGLEKQLKCESGS

SEQ ID NO: 1514 - protein, 207 aa, Artificial Sequence
  Sulfonylurea responsive repressor
MARLDKSKVINSALELLNEVGIEGLTTRKLAQKLGVEQPTLYWHVKNKRALLDAMAIEMFDRHDTHYCPLEGESWQDFLRNKAKSMRNALLSHRDGAKVALGTGFTEQQYETAENSLAFLTQQGFSLENALYAFQAVGIYTLGCVLLDQELQVAKEERETPTTDSMPPLVRQALELHDHQGAEPAFLFGLELIICGLEKQLKCESGS

SEQ ID NO: 1515 - protein, 207 aa, Artificial Sequence
  Sulfonylurea responsive repressor
MARLDKSKVINSALELLNEVGIEGLTTRKLAQKLGVEQPTLYWHVKNKRALLDAMAIEMFDRHATHYLPLEGESWQDFLRNRAKSMRNALLSHRDGAKVCLGTGFTEQQYETAENCLAFLTQQGFSLENALYAFQAVGIYTLGCVLLDQELQVAKEERETPTTDSMPPLVRQALELHDHQGAEPAFLFGLELIICGLEKQLKCESGS

SEQ ID NO: 1516 - protein, 207 aa, Artificial Sequence
  Sulfonylurea responsive repressor
MARLDKSKVINSALELLNEVGIEGLTTRKLAQKLGVEQPTLYWHVKNKRALLDAMAIEMLDRHDTHYCPLEGETWQDFLRNKAKSRRNALLSHRDGAKVALGTGFTEQQYETAENWLAFLTQQGFSLENALYAMQAVGIYTLGCVLLDQELQVAKEERETPTTDSMPPLVRQAYELRDHQGAEPAFLFGLELIICGLEKQLKCESGS

SEQ ID NO: 1517 - protein, 207 aa, Artificial Sequence
  Sulfonylurea responsive repressor
MARLDKSKVINSALELLNEVGIEGLTTRKLAQKLGVEQPTLYWHVKNKRALLDAMAIEMLDRHKTHYLPLEGESWQDFLRNRAKSMRNALLSHRDGAKVCLGTGFTEQQYETAENSLAFLTQQGFSLENALYAFQAVGIYTLGCVLLDQELQVAKEERETPTTDSMPPLVRQAFELKDHQGAEPAFLFGLELIICGLEKQLKCESGS

SEQ ID NO: 1518 - protein, 207 aa, Artificial Sequence
  Sulfonylurea responsive repressor
MARLDKSKVINSALELLNEVGIEGLTTRKLAQKLGVEQPTLYWHVKNKRALLDAMAIEMLDRHKTHYCPLEGESWQDFLRNRAKSMRNALLSHRDGAKVCLGTGFTEQQYETAENSLAFLTQQGFSLENALYAFQAVGIYTLGCVLLDQELQVAKEERETPTTDSMPPLVRQAIELKDHQGAEPAFLFGLELIICGLEKQLKAESGS

SEQ ID NO: 1519 - protein, 207 aa, Artificial Sequence
  Sulfonylurea responsive repressor
MARLDKSKVINSALELLNEVGIEGLTTRKLAQKLGVEQPTLYWHVKNKRALLDAMAIEMLDRHKTHYCPLEGESWQDFLRNKAKSMRNALLSHRDGAKVALGTGFTEQQYETMENSLAFLTQQGFSLENALYAMQAVGIYTLGCVLLDQELQVAKEERETPTTDSMPPLVRQAFELKDHQGAEPAFLFGLELIICGLEKQLKCESGS

SEQ ID NO: 1520 - protein, 207 aa, Artificial Sequence
  Sulfonylurea responsive repressor
MARLDKSKVINSALELLNEVGIEGLTTRKLAQKLGVEQPTLYWHVKNKRALLDAMAIEMFDRHATHYLPLEGESWQDFLRNRAKSMRNALLSHRDGAKVALGTGFTEQQYETMENSLAFLTQQGFSLENALYAMQAVGIYTLGCVLLDQELQVAKEERETPTTDSMPPLVRQAFELKDHQGAEPAFLFGLELIISGLEKQLKAESGS

SEQ ID NO: 1521 - protein, 207 aa, Artificial Sequence
  Sulfonylurea responsive repressor
MARLDKSKVINSALELLNEVGIEGLTTRKLAQKLGVEQPTLYWHVKNKRALLDAMAIEMLDRHKTHYLPLEGESWQDFLRNKAKSMRNALLSHRDGAKVCLGTGFTEQQYETAENCLAFLTQQGFSLENALYAFQAVGIYTLGCVLLDQELQVAKEERETPTTDSMPPLVRQALELKDHQGAEPAFLFGLELIISGLEKQLKAESGS

SEQ ID NO: 1522 - protein, 207 aa, Artificial Sequence
  Sulfonylurea responsive repressor
MARLDKSKVINSALELLNEVGIEGLTTRKLAQKLGVEQPTLYWHVKNKRALLDAMAIEMLDRHKTHYCPLEGESWQDFLRNNAKSMRNALLSHRDGAKVCLGTGFTEQQYETMENSLAFLTQQGLSLENALYAMQAVGIYTLGCVLLDQELQVAKEERETPTTDSMPPLVRQAYELKDHQGAEPAFLFGLELIICGLEKQLKCESGS

SEQ ID NO: 1523 - protein, 207 aa, Artificial Sequence
  Sulfonylurea responsive repressor
MARLDKSKVINSALELLNEVGIEGLTTRKLAQKLGVEQPTLYWHVKNKRALLDAMAIEMLDRHKTHYLPLEGESWQDFLRNRAKSMRNALLSHRDGAKVALGTGFTEQQYETMENSLAFLTQQGFSLENALYAMQAVGIYTLGCVLLDQELQVAKEERETPTTDSMPPLVRQAFELRDHQGAEPAFLFGLELIISGLEKQLKAESGS

SEQ ID NO: 1524 - protein, 207 aa, Artificial Sequence
  Sulfonylurea responsive repressor
MARLDKSKVINSALELLNEVGIEGLTTRKLAQKLGVEQPTLYWHVKNKRALLDAMAIEMLDRHKTHYLPLEGESWQDFLRNKAKSMRNALLSHRDGAKVCLGTGFTEQQYETAENSLAFLTQQGFSLENALYAFQAVGIYTLGCVLLDQELQVAKEERETPTTDSMPPLVRQAFELKDHQGAEPAFLFGLELIICGLEKQLKCESGS

SEQ ID NO: 1525 - protein, 207 aa, Artificial Sequence
  Sulfonylurea responsive repressor
MARLDKSKVINSALELLNEVGIEGLTTRKLAQKLGVEQPTLYWHVKNKRALLDAMAIEMLDRHQVHNLPLEGESWQDFLRNWAKSMRNALLSHRDGAKVCLGTGFTERQYETSENKLAFLTQQGFSLENALYAFQAVGIYTLGCVLLDQELQVAKEERETPTTDSMPPLVRQAIELADHQGAEPAFLFGLELIISGLEKQLKAESGS

SEQ ID NO: 1526 - protein, 207 aa, Artificial Sequence
  Sulfonylurea responsive repressor
MARLDKSKVINSALELLNEVGIEGLTTRKLAQKLGVEQPTLYWHVKNKRALLDAMALEMLDRHKTHYLPLEGESWQNFLRNWAKSMRNALLSHRDGAKVCLGTGFTEQQYETMENSLAFLTQQGFSLENALYAFQAVGIYTLGCVLLDQELQVAKEERDTPTTDSMPPLVRQAIELADHQGAEPAFLFGLELIISGLEKQLKAESGS

SEQ ID NO: 1527 - protein, 207 aa, Artificial Sequence
  Sulfonylurea responsive repressor
MARLDKSKVINSALELLNEVGIEGLTTRKLAQKLGVEQPTLYWHVKNKRALLDAMAIEMLDRHRTHYLPLEGESWQNFLRNKAKSMRNALLSHRDGAKVALGTGFTEKQYETQENSLAFLTQQGFSLENALYANQAVGIYTLGCVLLDQELQVAKEERETPTTDSMPPLVRQAIELADHQGAEPAFLFGLEVIISGLEKQLKAESGS

SEQ ID NO: 1528 - protein, 207 aa, Artificial Sequence
  Sulfonylurea responsive repressor
MARLDKSKVINSALELLNEVGIEGLTTRKLAQKLGVEQPTLYWHVKNKRALLDAMAIEMLDRHQIHYLPLEGESWQDFLRNWAKSMRNALLSHRDGAKVCLGTGFTEQQYETAENSLAFLTQQGFSLENALYAFQAVGIYTLGCVLLDQELKVAKEERETPTTDSMPPLVRQAFELADHQGAEPAFLFGLEQIISGLEKQLKVESGS

SEQ ID NO: 1529 - protein, 207 aa, Artificial Sequence
  Sulfonylurea responsive repressor
MARLDKSKVINSALELLNEVGIEGLTTRKLAQKLGVEQPTLYWHVKNKRALLDAMAREMLDRHTIHYLPLEGESWQNFLRNRAKSMRNALLSHRDGAKVCLGTGFTEQQYETMENSLAFLTQQGFSLENALYAMQAVGIYTLGCVLLDQELQVAKEERETPTTDSMPPLVRQAYELADHQGAEPAFLFGLELIISGLEKQLKAESGS

SEQ ID NO: 1530 - protein, 207 aa, Artificial Sequence
  Sulfonylurea responsive repressor
MARLDKSKVINSALELLNEVGIEGLTTRKLAQKLGVEQPTLYWHVKNKRALLDAMAIEMLDRHQIHYLPLEGESWQNFLRNRAKSMRNALLSHRDGAKVCLGTGFTEQQYETMENSLAFLTQQGFSLENALYAFQAVGIYTLGCVLLDQELQVAKEERETPTTDSMPPLVRQAVELADHQGAEPAFLFGLELIISGLEKQLKAESGS

SEQ ID NO: 1531 - protein, 207 aa, Artificial Sequence
  Sulfonylurea responsive repressor
MARLDKSKVINSALELLNEVGIEGLTTRKLAQKLGVEQPTLYWHVKNKRALLDAMAIEMLDRHRTHYLPLEGESWQNFLRNKAKSMRNALLSHRDGAKVCLGTGFTERQYETQENSLAFLTQQGFSLENALYANQAVGIYTLGCVLLDQELQVAKEERETPTTDSMPPLVRQAIELNDHQGAEPAFLFGLELIISGLEKQLKAESGS

SEQ ID NO: 1532 - protein, 207 aa, Artificial Sequence
  Sulfonylurea responsive repressor
MARLDKSKVINSALELLNEVGIEGLTTRKLAQKLGVEQPTLYWHVKNKRALLDAMAIEMLDRHRTHYLPLEGESWQDFLRNWAKSMRNALLSHRDGAKVALGTGFTEQQYETMENSLAFLTQQGFSLENALYANQAVGIYTLGCVLLDQELQVAKEERETPTTDSLPPLVRQAFELSDHQGAEPAFLFGLELIISGLEKQLKAESGS

SEQ ID NO: 1533 - protein, 207 aa, Artificial Sequence
  Sulfonylurea responsive repressor
MARLDKSKVINSALELLNEVGIEGLTTRKLAQKLGVEQPTLYWHVKNKRALLDAMAIEMLDRHRIHYLPLEGESWQNFLRNWAKSMRNALLSHRDGAKVCLGTGFTEQQYETSENSLAFLTQQGFSLENALYAMQAVGIYTLGCVLLDQELQVAKEERETPTTDSMPPLVRQAVELNDHQGAEPAFLFGLEQIISGLEKQLKAESGS

SEQ ID NO: 1534 - protein, 207 aa, Artificial Sequence
  Sulfonylurea responsive repressor
MARLDKSKVINSALELLNEVGIEGLTTRKLAQKLGVEQPTLYWHVKNKRALLDAMAIEMLDRHQIHYLPLEGESWQDFLRNKAKSMRNALLSHRDGAKVCLGTGFTEQQYETAENSLAFLTQQGFSLENALYANQAVGIYTLGCVLLDQELQVAKEERETPTTDSMPPLVRQAIELNDHQGAEPAFLFGLELIISGLEKQLKAESGS

SEQ ID NO: 1535 - protein, 207 aa, Artificial Sequence
  Sulfonylurea responsive repressor
MARLDKSKVINSALELLNEVGIEGLTTRKLAQKLGVEQPTLYWHVKNKRALLDAMAVEMLDRHQTHYLPLEGESWQDFLRNWAKSMRNALLSHRDGAKVCLGTGFTEQQYETMENSLAFLTQQGFSLENALYAFQAVGIYTLGCVLLDQELQVAKEERETPTTDSMPPLVRQAVELADHQGAEPAFLFGLELIISGLEKQLKAESGS

SEQ ID NO: 1536 - protein, 207 aa, Artificial Sequence
  Sulfonylurea responsive repressor
MARLDKSKVINSALELLNEVGIEGLTTRKLAQKLGVEQPTLYWHVKNKRALLDAMAIEMLDRHRTHYLPLEGESWQDFLRNKAKSMRNALLSHRDGAKVCLGTGFTERQYETQENNLAFLTQQGFSLENALYANQAVGIYTLGCVLLDQELQVAKEERETPTTDSMPPLVRQAFELADHQGAEPAFLFGLELIISGLEKQLKAESGS

SEQ ID NO: 1537 - protein, 207 aa, Artificial Sequence
  Sulfonylurea responsive repressor
MARLDKSKVINSALELLNEVGIEGLTTRKLAQKLGVEQPTLYWHVKNKRALLDAMAIEMLDRHRIHYLPLEGESWQDFLRNKAKSMRNALLSHRDGAKVCLGTGFTEQQYETQENSLAFLTQQGFSLENALYANQAVGIYTLGCVLLDQELQVAKEERETPTTDSMPPLVRQAIELADHQGAEPAFLFGLELIISGLEKQLKAESGS

SEQ ID NO: 1538 - protein, 207 aa, Artificial Sequence
  Sulfonylurea responsive repressor
  VARIANT 64, 73, 82, 100, 108, 116, 177: Xaa = Any Amino Acid
MARLDKSKVINSALELLNEVGIEGLTTRKLAQKLGVEQPTLYWHVKNKRALLDAMAIEMLDRHXIHYLPLEGXSWQDFLRNXAKSMRNALLSHRDGAKVXLGTGFTEXQYETMENXLAFLTQQGFSLENALYAMQAVGIHTLGCVLLDQELQVAKEERETPTTDSMPPLVRQAFELXDHQGAEPAFLFGLELIISGLEKQLKAESGS

SEQ ID NO: 1539 - protein, 207 aa, Artificial Sequence
  Sulfonylurea responsive repressor
MARLDKSKVINSALELLNEVGIEGLTTRKLAQKLGVEQPTLYWHVKNKRALLDAMAKEMLDRHQTHYLPLEGESWQNFLRNWAKSMRNALLSHRDGAKVCLGTGFTERQYETAENNLAFLKQQGFSLENALYANQAVGIYTLGCVLLDQELQVAKEERETPTADSMPPLVRQAIELNDHQGAEPAFLFGLELIISGLEKQLKAESGS

SEQ ID NO: 1540 - protein, 207 aa, Artificial Sequence
  Sulfonylurea responsive repressor
MARLDKSKVINSALELLNEVGIEGLTTRKLAQKLGVEQPTLYWHVKNKRALLDAMAIEMLDRHKTHYLPLEGESWQDFLRNKAKSMRNALLSHRDGAKVALGTGFTENQYETAENSLAFLTQQGFSLENALYAFQAVGIYTLGCVLLDQELQVAKEERETPTTDSMPPLVRQAVELADHQGAEPAFLFGLELIISGLEKQLKAESGS

SEQ ID NO: 1541 - protein, 207 aa, Artificial Sequence
  Sulfonylurea responsive repressor
MARLDKSKVINSALELLNEVGIEGLTTRKLAQKLGVEQPTLYWHVKNKRALLDAMAIEMLDRHQIHYLPLEGESWQDFLRNRAKSMRNALLSHRDGAKVCLGTGYTEQQYETSENSLAFLTQQGFSLENALYAFQAVGIYTLGCVLLDQELQVAKVERETPITDSMPPLVRQAVELNDHQGAEPAFLFGLELIISGLEKQLKAESGS

SEQ ID NO: 1542 - protein, 207 aa, Artificial Sequence
  Sulfonylurea responsive repressor
MARLDKSKVINSALELLNEVGIEGLTTRKLAQKLGVEQPTLYWHVKNKRALLDAMAIEMLDRHQTHYLPLEGESWQDFLRNKAKSMRNALLSHRDGAKVALGTGFTEKQYETQENSLAFLTQQGFSLENALYANQAVGIYTLGCVLLDQELQVAKEERETPTTDSMPPLVRQAFELADHQGAEPAFLFGLELIISGLEKQLKAESGS

SEQ ID NO: 1543 - protein, 207 aa, Artificial Sequence; identical to SEQ ID NO: 864
  Sulfonylurea responsive repressor

SEQ ID NO: 1544 - protein, 207 aa, Artificial Sequence
  Sulfonylurea responsive repressor
MARLDKSKVINSALELLNEVGIEGLTTRKLAQKLGVEQPTLYWHVKNKRALLDAMAIEMLDRHRTHYLPLEGESWQDFLRNRAKSMRNALLSHRDGAKVCLGTGFTEKQYETQENSLAFLTQQGFSLENALYANQAVGIYTLGCVLLDQELQVAKEERETPTTDSMPPLVRQAFELNDHQGAEPAFLFGLELLISGLEKQLKAESGS

SEQ ID NO: 1545 - protein, 207 aa, Artificial Sequence
  Sulfonylurea responsive repressor
MARLDKSKVINSALELLNEVGIEGLTTRKLAQKLGVEQPTLYWHVKNKRALLDAMAIEMLDRHRIHYLPLEGESWQDFLRNRAKSMRNALLSHRDGAKVCLGTGFTEQQYETAENNLAFLTQQGFSLENALYANQAVGIYTLGCVLLVQELHVAKEERETPTTDSMPPLVRQAVELFDHQGAEPAFLFGLELIISGLEKQLKAESGS

SEQ ID NO: 1546 - protein, 207 aa, Artificial Sequence
  Sulfonylurea responsive repressor
MARLDKSKVINSALELLNEVGIEGLTTRKLAQKLGVEQPTLYWHVKNKRALLDAMAIEMLDRHKTHYLPLEGESWQDFLRNRAKSMRNALLSHRDGAKVCLGTGFTEQQYETMENSLAFLTQQGFSLENALYAFQAVGIYTLGCVLLEQELQVAKEERETPTTDSMPPLVRQAVELADHQGAEPAFLFGLELIISGLEKQLKAESGS

SEQ ID NO: 1547 - protein, 207 aa, Artificial Sequence
  Sulfonylurea responsive repressor
MARLDKSKVINSALELLNEVGIEGLTTRKLAQKLGVEQPTLYWHVKNKRALLDAMAIEMLDRHRTHYLPLEGESWQDFLRNRAKSMRNALLSHRDGAKVALGTGFTERQYETQENSLAFLTQQGFSLENALYANQAVGIYTLGCVLLDQELQVAKEERETPTTDSMPPLVRQAIELNDHQGAEPAFLFGLELIISGLEKQLKAESGS

SEQ ID NO: 1548 - protein, 207 aa, Artificial Sequence
  Sulfonylurea responsive repressor
MARLDKSKVINSALELLNEVGIEGLTTRKLAQKLGVEQPTLYWHVKNKRALLDAMAIEMLDRHKIHYLPLEGESWQDFLRNRAKSMRNALLSHRDGAKVALGTGFTEKQYETQENNLAFLTQQGFSLENALYANQAVGIYTLGCVLLDQELQVAKEERETPTTDSMPPLVRQAFELNDHQGAEPAFLFGLELIISGLEKQLKAESGS

SEQ ID NO: 1549 - protein, 207 aa, Artificial Sequence
  Sulfonylurea responsive repressor
MARLDKSKVINSALELLNEVGIEGLTTRKLAQKLGVEQPTLYWHVKNKRALLDAMAIEMLDRHKIHYLPLEGESWQDFLRNWAKSMRNALLSHRDGAKVALGTGFTEQQYETSENSLAFLTQQGFSLENALYAFQAVGIYTLGCVLLDQELQVAKEERETPITDSMPPLVRQAYELADHQGAEPAFLFGLELIISGLEKQLKADSGS

SEQ ID NO: 1550 - protein, 207 aa, Artificial Sequence
  Sulfonylurea responsive repressor
MARLDKSKVINSALELLNEVGIEGLTTRKLAQKLGVEQPTLYWHVKNKRALLDAMAREMLDRHQTHYLPLEGESWQNFLRNKAKSMRNALLSHRDGAKVCLGTGFTERQYETSENWLAFLTQQGFSLENALYAFQAVGIYTLGCVLLDQELQVAKEERETPTTDSMPPLVRQAIELADHQGAEPAFLFGLELIISGLEKQLKAESGS

SEQ ID NO: 1551 - protein, 207 aa, Artificial Sequence
  Sulfonylurea responsive repressor
  VARIANT 64, 100, 108, 113: Xaa = Any Amino Acid
MARLDKSKVINSALELLNEVGIEGLTTRKLAQKLGVEQPTLYWHVKNKRALLDAMAIEMLDRHXIHYLPLEGESWQNFLRNRAKSMRNALLSHRDGAKVXLGTGFTEXQYETXENSLAFLTQQGFSLENALYAMQAVGIYTLGCVLLDQELQVAKEERETPTTDSMPPLVRQAIELADHQGAEPAFLFGLELIISGLEKQLKAESGS

SEQ ID NO: 1552 - protein, 207 aa, Artificial Sequence; identical to SEQ ID NO: 1531
  Sulfonylurea responsive repressor

SEQ ID NO: 1553 - protein, 207 aa, Artificial Sequence
  Sulfonylurea responsive repressor
MARLDKSKVINSALELLNEVGIEGLTTRKLAQKLGVEQPTLYWHVKNKRALLDAMAIEMLDRHRIHYLPLEGESWQDFLRNKAKSMRNALLSHRDGAKVCLGTGFTEQQYETQENNLAFLTQQGFSLENALYANQAVGIYTLGCVLLDQELQVAKEERETPTTDSMPPLVRQAVELADHQGAEPAFLFGLELIISGLEKQLKAESGS

SEQ ID NO: 1554 - protein, 207 aa, Artificial Sequence
  Sulfonylurea responsive repressor
MARLDKSKVINSALELLNEVGIEGLTTRKLAQKLGVEQPTLYWHVKNKRALLDAMAIEMLDRHKIHYLPLEGESWQNFLRNRAKSMRNALLSHRDGAKVCLGTGFTEQQYETQENNLAFLTQQGFSLENALYANQAVGIYTLSCVLLDQELQVAKEERETPTTDSMPPLVRQAFELADHQGAEPAFLFGLELIISGLEKQLKAESGS

SEQ ID NO: 1555 - protein, 207 aa, Artificial Sequence
  Sulfonylurea responsive repressor
MARLDKSKVINSALELLNEVGIEGLTTRKLAQKLGVEQPTLYWHVKNKRALLDAMAIEMLDRHKIHYLPLEGESWQDFLRNKAKSMRNALLSHRDGAKVCLGTGFTEQQYETQENSLAFLTQQGFSLENALYANQAVGIYTLGCVLLDQELQVAKEERETPTTDSMPPLVRQAYELADHQGAEPAFLFGLELIISGLEKQLKAESGS

SEQ ID NO: 1556 - protein, 207 aa, Artificial Sequence
  Sulfonylurea responsive repressor
MARLDKSKVINSALELLNEVGIEGLTTRKLAQKLGVEQPTLYWHVKNKRALLDAMAIEMLDRHQTHYLPLEGESWQNFLRNRAKSMRNALLSHRDGAKVCLGTGFTEKQYETQENSLAFLTQQGFSLENALYANQAVGIYTLGCVLLDQELQVAKEERETPTTDSMPPLVRQAIELADHQGAEPAFLFGLELIISGLEKQLKAESGS

SEQ ID NO: 1557 - protein, 207 aa, Artificial Sequence
  Sulfonylurea responsive repressor
MARLDKSKVINSALELLNEVGIEGLTTRKLAQKLGVEQPTLYWHVKNKRALLDAMAIEMLDRHTTHYLPLEGESWQNFLRNWAKSMRNALLSHRDGAKVCLGTGFTEQQYETMENSLAFLTQQGFSLENALYAMQAVGIYTLGCVLLDQELQVAKEERETPTTDSMPPLVRQAVELADHQGAEPAFLFGLELIISGLEKQLKAESGS

SEQ ID NO: 1558 - protein, 207 aa, Artificial Sequence
  Sulfonylurea responsive repressor
MARLDKSKVINSALELLNEVGIEGLTTRKLAQKLGVEQPTLYWHVKNKRALLDAMAIEMLGRHKTHYLPLEGESWQDFLRNWAKSMRNALLSHRDGAKVCLGTGFTEQQYETMENNLDFLTQQGFSLENALYAMQAVGIYTLGRVLLDQELQVAKEERETPTTDSMPPLVRQAFELFDHQGAEPAFLFGLELIISGLEKQLKAESGS

SEQ ID NO: 1559 - protein, 207 aa, Artificial Sequence
  Sulfonylurea responsive repressor
MARLDKSKVINSALELLNEVGIEGLTTRKLAQKLGVEQPTLYWHVKNKRALLDAMAIEMLDRHQIHYLPLEGESWQNFLRNKAKSMRNALLSHRDGAKVCLGTGFTEQQYETMENSLAFLTQQGFSLENALYALQAVGIYTLGCVLLDQELQVAKEERETPTTDSMPPLVRQAIELADHQGAEPAFLFGLELIISGLEKQLKAESGS

SEQ ID NO: 1560 - protein, 207 aa, Artificial Sequence
  Sulfonylurea responsive repressor
MARLDKSKVINSALELLNEVGIEGLTTRKLAQKLGVEQPTLYWHVKNKRALLDAMAREMLDRHKTHYLPLEGESWQNFLRNWAKSMRNALLSHRDGAKVCLGTGFTEQQYETAENNLAFLTQQGFSLEKALYAFQAVGIYTLGCVLLDQELQVAKEERETPTTDSMPPLVRQAFELFDHQGAEPAFLFGLELIISGLEKQLKAESGS

SEQ ID NO: 1561 - protein, 207 aa, Artificial Sequence
  Sulfonylurea responsive repressor
MARLDKSKVINSALELLNEVGIEGLTTRKLAQKLGVEQPTLYWHVKNKRALLDAMAIEMLDRHTTHYLPLEGESWQNFLRNRAKSMRNALLSHRDGAKVALGTGFTEKQYETQENNLAFLTQQGFSLENALYANQAVGIYTLGCVLLDQELQVAKEERETPTTDSMPPLVRQAVELADHQGAEPAFLFGLELIISGLEKQLKAESGS

SEQ ID NO: 1562 - protein, 207 aa, Artificial Sequence
  Sulfonylurea responsive repressor
MARLDKSKVINSALELLNEVGIEGLTTRKLAQKLGVEQPTLYWHVKNKRALLDAMAIEMLDRHKTHYLPLEGESWQDFLRNRAKSMRNALLSHRDGAKVCLGTGFTERQYETQENNLAFLTQQGFSLENALYANQAVGIYTLGCVLLDQELQVAKEERETPTTDSMPPLVRQAIELADHQGAEPAFLFGLELIISGLEKQLKAESGS

SEQ ID NO: 1563 - protein, 207 aa, Artificial Sequence
  Sulfonylurea responsive repressor
MARLDKSKVINSALELLNEVGIEGLTTRKLAQKLGVEQPTLYWHVKNKRALLDAMAIEMLDRHKTHYLPLEGESWQDFLRNKAKSMRIALLSHRDGAKVCLGTGFTEKQYETAENTLAFLTQQGFSLENALYAFQAVGIYTLGCVLLDQELQVAKEERETPTTDSMPPLVRQAFELADHQGAEPAFLFGLELIISGLEKQLKAESGS

SEQ ID NO: 1564 - protein, 207 aa, Artificial Sequence
  Sulfonylurea responsive repressor
MARLDKSKVINSALELLNEVGIEGLTTRKLAQKLGVEQPTLYWHVKNKRALLDAMAIEMLDRHRIHYLPLEGESWQDFLRNWAKSMRNALLSHRDGAKVCLGTGFTERQYETQENKLAFLTQQGFSLENALYANQAVGIYTLGCVLLDQELQVAKEERETPTTDSMPPLVRQAIELADHQGAEPAFLFGLELIISGLEKQLEAESGS

SEQ ID NO: 1565 - protein, 207 aa, Artificial Sequence
  Sulfonylurea responsive repressor
MARLDKSKVINSALELLNEVGIEGLTTRKLAQKLGVEQPTLYWHVKNKRALLDAMAIEMLDRHRTHYLPLEGESWQDFLRNWAKSMRNALLSHRDGAKVCLGTGFTEQQYETSENKLAFLTQQGFSLENALYVFQAVGIYTLGCALLDQELQVAKEERETPTTDSMPPLVRQAVELFDHQGAEPAFLFGLELIISGLEKQLKAESGS

SEQ ID NO: 1566 - protein, 207 aa, Artificial Sequence
  Sulfonylurea responsive repressor
MARLDKSKVINSALELLNEVGIEGLTTRKLAQKLGVEQPTLYWHVKNKRALLDAMAIEMLDPHRIHYLPLEGESWQNFLRNWAKSMRNALLSHRDGAKVCLGTGFTEQQYETMENSLAFLTQQGFSLENALYAMQAVGIYTLGCVLLDQELQVAKEERETPTTDSMPPLVRQAVELADHQGAEPAFLFGLELIISGLEKQLKAESGS

SEQ ID NO: 1567 - protein, 207 aa, Artificial Sequence
  Sulfonylurea responsive repressor
MARLDKSKVINSALELLNEVGIEGLTTRKLAQKLGVEQPTLYWHVKNKRALLDAMAIEMLDRHQTHYLPLEGESWQDFLRNNAKSMRNALLSHRDGAKVALGTGFTERQYETQENKLAFLTQQGFSLENALYANQAVGIYTLGCVLLDQELQVAKEERETPTTDSMPPLVRQAVELADHQGAEPAFLFGLELIISGLEKQLKAESGS

SEQ ID NO: 1568 - protein, 207 aa, Artificial Sequence
  Sulfonylurea responsive repressor
MARLDKSKVINSALELLNEVGIEGLTTRKLAQKLGVEQPTLYWHVKNKRALLDAMAIEMLDRHKIHYLPLEGESWQDFLRNKAKSMRNALLSHRDGAKVCLGTGFTEQQYETQENNLAFLTQQGFSLENALYAMQAVGIYTLGYVLLDQELQVAKEERETPTTDSMPPLVRQAIELADHQGAEPAFLFGLELIISGLEKQLKAESES

SEQ ID NO: 1569 - DNA, 42 bp, Artificial Sequence
  Oligonucleotides
tattggcatgtaaaaaataagcgagctctgctcgacgcctta

SEQ ID NO: 1570 - DNA, 42 bp, Artificial Sequence
  Oligonucleotides
gccattgagatgwtggataggcaccasactcacttttgccct

SEQ ID NO: 1571 - DNA, 42 bp, Artificial Sequence
  Oligonucleotides
gccattgagatgwtggataggcacgcaactcacttttgccct

SEQ ID NO: 1572 - DNA, 42 bp, Artificial Sequence
  Oligonucleotides
ttagaaggggaaagctggcaagattttttacgtaatamtgct

SEQ ID NO: 1573 - DNA, 42 bp, Artificial Sequence
  Oligonucleotides
aaaagttacagatgtgctttactaagtcatcgcgatggagca

SEQ ID NO: 1574 - DNA, 42 bp, Artificial Sequence
  Oligonucleotides
aaaagtatgagatgtgctttactaagtcatcgcgatggagca

SEQ ID NO: 1575 - DNA, 42 bp, Artificial Sequence
  Oligonucleotides
aaagtatrtttaggtacacgcdtcacagaaaaacagtatgaa

SEQ ID NO: 1576 - DNA, 42 bp, Artificial Sequence
  Oligonucleotides
aaagtatrtttaggtacacgctggacagaaaaacagtatgaa

SEQ ID NO: 1577 - DNA, 42 bp, Artificial Sequence
  Oligonucleotides
aaagtatrtttaggtacagstdtcacagaaaaacagtatgaa

SEQ ID NO: 1578 - DNA, 42 bp, Artificial Sequence
  Oligonucleotides
aaagtatrtttaggtacagsttggacagaaaaacagtatgaa

SEQ ID NO: 1579 - DNA, 42 bp, Artificial Sequence
  Oligonucleotides
aaagtatggttaggtacacgcdtcacagaaaaacagtatgaa

SEQ ID NO: 1580 - DNA, 42 bp, Artificial Sequence
  Oligonucleotides
aaagtatggttaggtacacgctggacagaaaaacagtatgaa

SEQ ID NO: 1581 - DNA, 42 bp, Artificial Sequence
  Oligonucleotides
aaagtatggttaggtacagstdtcacagaaaaacagtatgaa

SEQ ID NO: 1582 - DNA, 42 bp, Artificial Sequence
  Oligonucleotides
aaagtatggttaggtacagsttggacagaaaaacagtatgaa

SEQ ID NO: 1583 - DNA, 42 bp, Artificial Sequence
  Oligonucleotides
actaaagaaaatarcttagcctttttatgccaacaaggtttt

SEQ ID NO: 1584 - DNA, 42 bp, Artificial Sequence
  Oligonucleotides
actaaagaaaatcaattagcctttttatgccaacaaggtttt

SEQ ID NO: 1585 - DNA, 42 bp, Artificial Sequence
  Oligonucleotides
actaaagaaaatatgttagcctttttatgccaacaaggtttt

SEQ ID NO: 1586 - DNA, 42 bp, Artificial Sequence
  Oligonucleotides
actsctgaaaatarcttagcctttttatgccaacaaggtttt

SEQ ID NO: 1587 - DNA, 42 bp, Artificial Sequence
  Oligonucleotides
actsctgaaaatcaattagcctttttatgccaacaaggtttt

SEQ ID NO: 1588 - DNA, 42 bp, Artificial Sequence
  Oligonucleotides
actsctgaaaatatgttagcctttttatgccaacaaggtttt

SEQ ID NO: 1589 - DNA, 42 bp, Artificial Sequence
  Oligonucleotides
tcactagagaatgcattatatgcartgagtgctgtggctawt

SEQ ID NO: 1590 - DNA, 42 bp, Artificial Sequence
  Oligonucleotides
tcactagagaatgcattatatgcartgagtgctgtggctgkt

SEQ ID NO: 1591 - DNA, 42 bp, Artificial Sequence
  Oligonucleotides
tcactagagaatgcattatatgcartgagtgctgtgygcawt

SEQ ID NO: 1592 - DNA, 42 bp, Artificial Sequence
  Oligonucleotides
tcactagagaatgcattatatgcartgagtgctgtgygcgkt

SEQ ID NO: 1593 - DNA, 42 bp, Artificial Sequence
  Oligonucleotides
tcactagagaatgcattatatgcartgmaagctgtggctawt

SEQ ID NO: 1594 - DNA, 42 bp, Artificial Sequence
  Oligonucleotides
tcactagagaatgcattatatgcartgmaagctgtggctgkt

SEQ ID NO: 1595 - DNA, 42 bp, Artificial Sequence
  Oligonucleotides
tcactagagaatgcattatatgcartgmaagctgtgygcawt

SEQ ID NO: 1596 - DNA, 42 bp, Artificial Sequence
  Oligonucleotides
tcactagagaatgcattatatgcartgmaagctgtgygcgkt

SEQ ID NO: 1597 - DNA, 42 bp, Artificial Sequence
  Oligonucleotides
tcactagagaatgcattatatgcawggagtgctgtggctawt

SEQ ID NO: 1598 - DNA, 42 bp, Artificial Sequence
  Oligonucleotides
tcactagagaatgcattatatgcawggagtgctgtggctgkt

SEQ ID NO: 1599 - DNA, 42 bp, Artificial Sequence
  Oligonucleotides
tcactagagaatgcattatatgcawggagtgctgtgygcawt

SEQ ID NO: 1600 - DNA, 42 bp, Artificial Sequence
  Oligonucleotides
tcactagagaatgcattatatgcawggagtgctgtgygcgkt

SEQ ID NO: 1601 - DNA, 42 bp, Artificial Sequence
  Oligonucleotides
tcactagagaatgcattatatgcawggmaagctgtggctawt

SEQ ID NO: 1602 - DNA, 42 bp, Artificial Sequence
  Oligonucleotides
tcactagagaatgcattatatgcawggmaagctgtggctgkt

SEQ ID NO: 1603 - DNA, 42 bp, Artificial Sequence
  Oligonucleotides
tcactagagaatgcattatatgcawggmaagctgtgygcawt

SEQ ID NO: 1604 - DNA, 42 bp, Artificial Sequence
  Oligonucleotides
tcactagagaatgcattatatgcawggmaagctgtgygcgkt

SEQ ID NO: 1605 - DNA, 42 bp, Artificial Sequence
  Oligonucleotides
tttactttaggttgcgtattgtkggatcaagagagmcaagtc

SEQ ID NO: 1606 - DNA, 42 bp, Artificial Sequence
  Oligonucleotides
tttactttaggttgcgtattgtkggatcaagagmtgcaagtc

SEQ ID NO: 1607 - DNA, 42 bp, Artificial Sequence
  Oligonucleotides
tttactttaggttgcgtattgtytgatcaagagagmcaagtc

SEQ ID NO: 1608 - DNA, 42 bp, Artificial Sequence
  Oligonucleotides
tttactttaggttgcgtattgtytgatcaagagmtgcaagtc

SEQ ID NO: 1609 - DNA, 42 bp, Artificial Sequence
  Oligonucleotides
gctaaagaagaaagggaaacacctactactgmtagtatgccg

SEQ ID NO: 1610 - DNA, 42 bp, Artificial Sequence
  Oligonucleotides
ccattattacgacaagctagtgaattattggatcaccaaggt

SEQ ID NO: 1611 - DNA, 42 bp, Artificial Sequence
  Oligonucleotides
ccattattacgacaagctagtgaattakcagatcaccaaggt

SEQ ID NO: 1612 - DNA, 42 bp, Artificial Sequence
  Oligonucleotides
ccattattacgacaagctagtgaattaaaggatcaccaaggt

SEQ ID NO: 1613 - DNA, 42 bp, Artificial Sequence
  Oligonucleotides
ccattattacgacaagcttkggaattattggatcaccaaggt

SEQ ID NO: 1614 - DNA, 42 bp, Artificial Sequence
  Oligonucleotides
ccattattacgacaagcttkggaattakcagatcaccaaggt

SEQ ID NO: 1615 - DNA, 42 bp, Artificial Sequence
  Oligonucleotides
ccattattacgacaagcttkggaattaaaggatcaccaaggt

SEQ ID NO: 1616 - DNA, 42 bp, Artificial Sequence
  Oligonucleotides
ccattattacgacaagctgtagaattattggatcaccaaggt

SEQ ID NO: 1617 - DNA, 42 bp, Artificial Sequence
  Oligonucleotides
ccattattacgacaagctgtagaattakcagatcaccaaggt

SEQ ID NO: 1618 - DNA, 42 bp, Artificial Sequence
  Oligonucleotides
ccattattacgacaagctgtagaattaaaggatcaccaaggt

SEQ ID NO: 1619 - DNA, 42 bp, Artificial Sequence
  Oligonucleotides
gcagagccagccttcttattcggccttgaattgatcatatgc

SEQ ID NO: 1620 - DNA, 39 bp, Artificial Sequence
  Oligonucleotides
ggattagaaaaacaacttaaatscgaaagtgggtcttaa

SEQ ID NO: 1621 - DNA, 42 bp, Artificial Sequence
  Oligonucleotides
cctatccawcatctcaatggctaaggcgtcgagcagagctcg

SEQ ID NO: 1622 - DNA, 42 bp, Artificial Sequence
  Oligonucleotides
ttgccagctttccccttctaaagggcaaaagtgagtstggtg

SEQ ID NO: 1623 - DNA, 42 bp, Artificial Sequence
  Oligonucleotides
ttgccagctttccccttctaaagggcaaaagtgagttgcgtg

SEQ ID NO: 1624 - DNA, 42 bp, Artificial Sequence
  Oligonucleotides
taaagcacatctgtaacttttagcaktattacgtaaaaaatc

SEQ ID NO: 1625 - DNA, 42 bp, Artificial Sequence
  Oligonucleotides
taaagcacatctcatacttttagcaktattacgtaaaaaatc

SEQ ID NO: 1626 - DNA, 42 bp, Artificial Sequence
  Oligonucleotides
gcgtgtacctaaayatacttttgctccatcgcgatgacttag

SEQ ID NO: 1627 - DNA, 42 bp, Artificial Sequence
  Oligonucleotides
asctgtacctaaayatacttttgctccatcgcgatgacttag

SEQ ID NO: 1628 - DNA, 42 bp, Artificial Sequence
  Oligonucleotides
gcgtgtacctaaccatacttttgctccatcgcgatgacttag

SEQ ID NO: 1629 - DNA, 42 bp, Artificial Sequence
  Oligonucleotides
asctgtacctaaccatacttttgctccatcgcgatgacttag

SEQ ID NO: 1630 - DNA, 42 bp, Artificial Sequence
  Oligonucleotides
ggctaagytattttctttagtttcatactgtttttctgtgah

SEQ ID NO: 1631 - DNA, 42 bp, Artificial Sequence
  Oligonucleotides
ggctaattgattttctttagtttcatactgtttttctgtgah

SEQ ID NO: 1632 - DNA, 42 bp, Artificial Sequence
  Oligonucleotides
ggctaacatattttctttagtttcatactgtttttctgtgah

SEQ ID NO: 1633 - DNA, 42 bp, Artificial Sequence
  Oligonucleotides
ggctaagytattttcagsagtttcatactgtttttctgtgah

SEQ ID NO: 1634 - DNA, 42 bp, Artificial Sequence
  Oligonucleotides
ggctaattgattttcagsagtttcatactgtttttctgtgah

SEQ ID NO: 1635 - DNA, 42 bp, Artificial Sequence
  Oligonucleotides
ggctaacatattttcagsagtttcatactgtttttctgtgah

SEQ ID NO: 1636 - DNA, 42 bp, Artificial Sequence
  Oligonucleotides
ggctaagytattttctttagtttcatactgtttttctgtcca

SEQ ID NO: 1637 - DNA, 42 bp, Artificial Sequence
  Oligonucleotides
ggctaattgattttctttagtttcatactgtttttctgtcca

SEQ ID NO: 1638 - DNA, 42 bp, Artificial Sequence
  Oligonucleotides
ggctaacatattttctttagtttcatactgtttttctgtcca

SEQ ID NO: 1639 - DNA, 42 bp, Artificial Sequence
  Oligonucleotides
ggctaagytattttcagsagtttcatactgtttttctgtcca

SEQ ID NO: 1640 - DNA, 42 bp, Artificial Sequence
  Oligonucleotides
ggctaattgattttcagsagtttcatactgtttttctgtcca

SEQ ID NO: 1641 - DNA, 42 bp, Artificial Sequence
  Oligonucleotides
ggctaacatattttcagsagtttcatactgtttttctgtcca

SEQ ID NO: 1642 - DNA, 42 bp, Artificial Sequence
  Oligonucleotides
atataatgcattctctagtgaaaaaccttgttggcataaaaa

SEQ ID NO: 1643 - DNA, 42 bp, Artificial Sequence
  Oligonucleotides
caatacgcaacctaaagtaaaawtagccacagcactcaytgc

SEQ ID NO: 1644 - DNA, 42 bp, Artificial Sequence
  Oligonucleotides
caatacgcaacctaaagtaaaamcagccacagcactcaytgc

SEQ ID NO: 1645 - DNA, 42 bp, Artificial Sequence
  Oligonucleotides
caatacgcaacctaaagtaaaawtgcrcacagcactcaytgc

SEQ ID NO: 1646 - DNA, 42 bp, Artificial Sequence
  Oligonucleotides
caatacgcaacctaaagtaaaamcgcrcacagcactcaytgc

SEQ ID NO: 1647 - DNA, 42 bp, Artificial Sequence
  Oligonucleotides
caatacgcaacctaaagtaaaawtagccacagcttkcaytgc

SEQ ID NO: 1648 - DNA, 42 bp, Artificial Sequence
  Oligonucleotides
caatacgcaacctaaagtaaaamcagccacagcttkcaytgc

SEQ ID NO: 1649 - DNA, 42 bp, Artificial Sequence
  Oligonucleotides
caatacgcaacctaaagtaaaawtgcrcacagcttkcaytgc

SEQ ID NO: 1650 - DNA, 42 bp, Artificial Sequence
  Oligonucleotides
caatacgcaacctaaagtaaaamcgcrcacagcttkcaytgc

SEQ ID NO: 1651 - DNA, 42 bp, Artificial Sequence
  Oligonucleotides
caatacgcaacctaaagtaaaawtagccacagcactccwtgc

SEQ ID NO: 1652 - DNA, 42 bp, Artificial Sequence
  Oligonucleotides
caatacgcaacctaaagtaaaamcagccacagcactccwtgc

SEQ ID NO: 1653 - DNA, 42 bp, Artificial Sequence
  Oligonucleotides
caatacgcaacctaaagtaaaawtgcrcacagcactccwtgc

SEQ ID NO: 1654 - DNA, 42 bp, Artificial Sequence
  Oligonucleotides
caatacgcaacctaaagtaaaamcgcrcacagcactccwtgc

SEQ ID NO: 1655 - DNA, 42 bp, Artificial Sequence
  Oligonucleotides
caatacgcaacctaaagtaaaawtagccacagcttkccwtgc

SEQ ID NO: 1656 - DNA, 42 bp, Artificial Sequence
  Oligonucleotides
caatacgcaacctaaagtaaaamcagccacagcttkccwtgc

SEQ ID NO: 1657 - DNA, 42 bp, Artificial Sequence
  Oligonucleotides
caatacgcaacctaaagtaaaawtgcrcacagcttkccwtgc

SEQ ID NO: 1658 - DNA, 42 bp, Artificial Sequence
  Oligonucleotides
caatacgcaacctaaagtaaaamcgcrcacagcttkccwtgc

SEQ ID NO: 1659 - DNA, 42 bp, Artificial Sequence
  Oligonucleotides
tgtttccctttcttctttagcgacttgkctctcttgatccma

SEQ ID NO: 1660 - DNA, 42 bp, Artificial Sequence
  Oligonucleotides
tgtttccctttcttctttagcgacttgcakctcttgatccma

SEQ ID NO: 1661 - DNA, 42 bp, Artificial Sequence
  Oligonucleotides
tgtttccctttcttctttagcgacttgkctctcttgatcara

SEQ ID NO: 1662 - DNA, 42 bp, Artificial Sequence
  Oligonucleotides
tgtttccctttcttctttagcgacttgcakctcttgatcara

SEQ ID NO: 1663 - DNA, 42 bp, Artificial Sequence
  Oligonucleotides
actagcttgtcgtaataatggcggcatactakcagtagtagg

SEQ ID NO: 1664 - DNA, 42 bp, Artificial Sequence
  Oligonucleotides
cmaagcttgtcgtaataatggcggcatactakcagtagtagg

SEQ ID NO: 1665 - DNA, 42 bp, Artificial Sequence
  Oligonucleotides
tacagcttgtcgtaataatggcggcatactakcagtagtagg

SEQ ID NO: 1666 - DNA, 42 bp, Artificial Sequence
  Oligonucleotides
gaataagaaggctggctctgcaccttggtgatccaataattc

SEQ ID NO: 1667 - DNA, 42 bp, Artificial Sequence
  Oligonucleotides
gaataagaaggctggctctgcaccttggtgatctgmtaattc

SEQ ID NO: 1668 - DNA, 42 bp, Artificial Sequence
  Oligonucleotides
gaataagaaggctggctctgcaccttggtgatcctttaattc

SEQ ID NO: 1669 - DNA, 42 bp, Artificial Sequence
  Oligonucleotides
tttaagttgtttttctaatccgcatatgatcaattcaaggcc

SEQ ID NO: 1670 - DNA, 35 bp, Artificial Sequence
  Oligonucleotides
gggaacttcggcgcgccttaagacccactttcgsa

SEQ ID NO: 1671 - DNA, 42 bp, Artificial Sequence; identical to SEQ ID NO: 1569
  Oligonucleotides

SEQ ID NO: 1672 - DNA, 42 bp, Artificial Sequence; identical to SEQ ID NO: 1619
  Oligonucleotides

SEQ ID NO: 1673 - DNA, 42 bp, Artificial Sequence; identical to SEQ ID NO: 1642
  Oligonucleotides

SEQ ID NO: 1674 - DNA, 42 bp, Artificial Sequence; identical to SEQ ID NO: 1669
  Oligonucleotides

SEQ ID NO: 1675 - DNA, 42 bp, Artificial Sequence; identical to SEQ ID NO: 1572
  Oligonucleotides

SEQ ID NO: 1676 - DNA, 42 bp, Artificial Sequence; identical to SEQ ID NO: 1625
  Oligonucleotides

SEQ ID NO: 1677 - DNA, 42 bp, Artificial Sequence
  Oligonucleotides
ttgccagctttccccttctaaagggcamahgtgagttgcgtg

SEQ ID NO: 1678 - DNA, 42 bp, Artificial Sequence
  Oligonucleotides
ttgccagctttccccttctaaagggcaatagtgagttgcgtg

SEQ ID NO: 1679 - DNA, 42 bp, Artificial Sequence; identical to SEQ ID NO: 1668
  Oligonucleotides

SEQ ID NO: 1680 - DNA, 42 bp, Artificial Sequence
  Oligonucleotides
gccattgagatgatggataggcacgcaactcactattgccct

SEQ ID NO: 1681 - DNA, 42 bp, Artificial Sequence
  Oligonucleotides
rstgctgaaaatatgttagcctttttatgccaacaaggtttt

SEQ ID NO: 1682 - DNA, 42 bp, Artificial Sequence
  Oligonucleotides
tttactttaggttgcgtattgtttgatcaagagctccaagtc

SEQ ID NO: 1683 - DNA, 42 bp, Artificial Sequence
  Oligonucleotides
tgtttccctttcttctttagcgacttggagctcttgatcaaa

SEQ ID NO: 1684 - DNA, 42 bp, Artificial Sequence
  Oligonucleotides
gccattgagatgatggataggcacgcaactcacdtktgccct

SEQ ID NO: 1685 - DNA, 42 bp, Artificial Sequence
  Oligonucleotides
gccattgagatgatggataggcaccaaactcacdtktgccct

SEQ ID NO: 1686 - DNA, 42 bp, Artificial Sequence
  Oligonucleotides
gccattgagatgatggataggcaccaaactcactattgccct

SEQ ID NO: 1687 - DNA, 42 bp, Artificial Sequence
  Oligonucleotides
aaaagtatgagatgtgctttactaagccatcgcgatggagca

SEQ ID NO: 1688 - DNA, 42 bp, Artificial Sequence
  Oligonucleotides
aaagtatgkttaggtacacgctggacagaamaacawtatgaa

SEQ ID NO: 1689 - DNA, 42 bp, Artificial Sequence
  Oligonucleotides
aaagtatgkttaggtacacgctggacagaamaawtgtatgaa

SEQ ID NO: 1690 - DNA, 42 bp, Artificial Sequence
  Oligonucleotides
rstgctgaaaatcaattagcctttttatgccaacaaggtttt

SEQ ID NO: 1691 - DNA, 42 bp, Artificial Sequence
  Oligonucleotides
tcactagagaatgcattatatgcartgagtgcgtggrgggtg

SEQ ID NO: 1692 - DNA, 42 bp, Artificial Sequence
  Oligonucleotides
tcactagagaatgcattatatgcartgagtgcgtggrggaac

SEQ ID NO: 1693 - DNA, 42 bp, Artificial Sequence
  Oligonucleotides
tttactttaggttgcgtattgtttgatcaagagagccaagtc

SEQ ID NO: 1694 - DNA, 42 bp, Artificial Sequence
  Oligonucleotides
gctaaagaagaaagggaaacacctactactgctagtatgccg

SEQ ID NO: 1695 - DNA, 42 bp, Artificial Sequence
  Oligonucleotides
ccattaktgcgacaagbttkggaattaaaggatcaccaaggt

SEQ ID NO: 1696 - DNA, 42 bp, Artificial Sequence
  Oligonucleotides
ccattagcccgacaagbttkggaattaaaggatcaccaaggt

SEQ ID NO: 1697 - DNA, 39 bp, Artificial Sequence
  Oligonucleotides
ggattagaaaaacaacttaaatgcgaaagtgggtcttaa

SEQ ID NO: 1698 - DNA, 42 bp, Artificial Sequence
  Oligonucleotides
cctatccatcatctcaatggctaaggcgtcgagcagagctcg

SEQ ID NO: 1699 - DNA, 42 bp, Artificial Sequence
  Oligonucleotides
ttgccagctttccccttctaaagggcamahgtgagtttggtg

SEQ ID NO: 1700 - DNA, 42 bp, Artificial Sequence
  Oligonucleotides
ttgccagctttccccttctaaagggcaatagtgagtttggtg

SEQ ID NO: 1701 - DNA, 42 bp, Artificial Sequence
  Oligonucleotides
gcgtgtacctaamcatacttttgctccatcgcgatggcttag

SEQ ID NO: 1702 - DNA, 42 bp, Artificial Sequence
  Oligonucleotides
ggctaacatattttcagcasyttcatawtgttkttctgtcca

SEQ ID NO: 1703 - DNA, 42 bp, Artificial Sequence
  Oligonucleotides
ggctaattgattttcagcasyttcatawtgttkttctgtcca

SEQ ID NO: 1704 - DNA, 42 bp, Artificial Sequence
  Oligonucleotides
ggctaacatattttcagcasyttcatacawttkttctgtcca

SEQ ID NO: 1705 - DNA, 42 bp, Artificial Sequence
  Oligonucleotides
ggctaattgattttcagcasyttcatacawttkttctgtcca

SEQ ID NO: 1706 - DNA, 42 bp, Artificial Sequence
  Oligonucleotides
caatacgcaacctaaagtaaacacccycacagcactcaytgc

SEQ ID NO: 1707 - DNA, 42 bp, Artificial Sequence
  Oligonucleotides
caatacgcaacctaaagtaaagttccycacagcactcaytgc

SEQ ID NO: 1708 - DNA, 42 bp, Artificial Sequence
  Oligonucleotides
tgtttccctttcttctttagcgacttggctctcttgatcaaa

SEQ ID NO: 1709 - DNA, 42 bp, Artificial Sequence
  Oligonucleotides
cmaavcttgtcgcamtaatggcggcatactagcagtagtagg

SEQ ID NO: 1710 - DNA, 42 bp, Artificial Sequence
  Oligonucleotides
cmaavcttgtcgggctaatggcggcatactagcagtagtagg

SEQ ID NO: 1711 - DNA, 35 bp, Artificial Sequence
  Oligonucleotides
gggaacttcggcgcgccttaagacccactttcgca

SEQ ID NO: 1712 - DNA, 40 bp, Artificial Sequence
  Oligonucleotides
cacacaggaatccatggccagactcgacaagagcaaggtg

SEQ ID NO: 1713 - DNA, 42 bp, Artificial Sequence
  Oligonucleotides
atcaacagcgcactggagctgctgaacgaggtcggaatcgaa

SEQ ID NO: 1714 - DNA, 42 bp, Artificial Sequence
  Oligonucleotides
ggcctcacaacccgtaaactcgcccagaagctcggggtagag

SEQ ID NO: 1715 - DNA, 42 bp, Artificial Sequence
  Oligonucleotides
cagcctacattgtattggcacgtcaagaacaagcgagctctg

SEQ ID NO: 1716 - DNA, 42 bp, Artificial Sequence
  Oligonucleotides
ctagacgccwtggccattgagatgwtggataggcaccawacc

SEQ ID NO: 1717 - DNA, 42 bp, Artificial Sequence
  Oligonucleotides
ctagacgccwtggccattgagatgwtggataggcacvttacc

SEQ ID NO: 1718 - DNA, 42 bp, Artificial Sequence
  Oligonucleotides
cactactgccctttggaaggggaaagctggcaagacttcttg

SEQ ID NO: 1719 - DNA, 42 bp, Artificial Sequence
  Oligonucleotides
aggaacaacgctaagagcwtsagatgtgctttgctcagtcac

SEQ ID NO: 1720 - DNA, 42 bp, Artificial Sequence
  Oligonucleotides
aggaacaacgctaagagctggagatgtgctttgctcagtcac

SEQ ID NO: 1721 - DNA, 42 bp, Artificial Sequence
  Oligonucleotides
aggaacaacgctaagagctacagatgtgctttgctcagtcac

SEQ ID NO: 1722 - DNA, 42 bp, Artificial Sequence
  Oligonucleotides
aggaacvttgctaagagcwtsagatgtgctttgctcagtcac

SEQ ID NO: 1723 - DNA, 42 bp, Artificial Sequence
  Oligonucleotides
aggaacvttgctaagagctggagatgtgctttgctcagtcac

SEQ ID NO: 1724 - DNA, 42 bp, Artificial Sequence
  Oligonucleotides
aggaacvttgctaagagctacagatgtgctttgctcagtcac

SEQ ID NO: 1725 - DNA, 42 bp, Artificial Sequence
  Oligonucleotides
cgtgatggagccaaggtctgsctaggtacagcgtkgacggag

SEQ ID NO: 1726 - DNA, 42 bp, Artificial Sequence
  Oligonucleotides
cgtgatggagccaaggtctgsctaggtacagcgtwcacggag

SEQ ID NO: 1727 - DNA, 42 bp, Artificial Sequence
  Oligonucleotides
cgtgatggagccaaggtctgsctaggtacasggtkgacggag

SEQ ID NO: 1728 - DNA, 42 bp, Artificial Sequence
  Oligonucleotides
cgtgatggagccaaggtctgsctaggtacasggtwcacggag

SEQ ID NO: 1729 - DNA, 42 bp, Artificial Sequence
  Oligonucleotides
cgtgatggagccaaggtcrtgctaggtacagcgtkgacggag

SEQ ID NO: 1730 - DNA, 42 bp, Artificial Sequence
  Oligonucleotides
cgtgatggagccaaggtcrtgctaggtacagcgtwcacggag

SEQ ID NO: 1731 - DNA, 42 bp, Artificial Sequence
  Oligonucleotides
cgtgatggagccaaggtcrtgctaggtacasggtkgacggag

SEQ ID NO: 1732 - DNA, 42 bp, Artificial Sequence
  Oligonucleotides
cgtgatggagccaaggtcrtgctaggtacasggtwcacggag

SEQ ID NO: 1733 - DNA, 42 bp, Artificial Sequence
  Oligonucleotides
caacagtatgaawctgyggagaacatgwtggccttcctgtgc

SEQ ID NO: 1734 - DNA, 42 bp, Artificial Sequence
  Oligonucleotides
caacaaggtttctcccttgagaatgccwtgtacgcavtcdcg

SEQ ID NO: 1735 - DNA, 42 bp, Artificial Sequence
  Oligonucleotides
caacaaggtttctcccttgagaatgccwtgtacgcavtcmag

SEQ ID NO: 1736 - DNA, 42 bp, Artificial Sequence
  Oligonucleotides
caacaaggtttctcccttgagaatgccwtgtacgcavtcygc

SEQ ID NO: 1737 - DNA, 42 bp, Artificial Sequence
  Oligonucleotides
caacaaggtttctcccttgagaatgccwtgtacgcavtcgam

SEQ ID NO: 1738 - DNA, 42 bp, Artificial Sequence
  Oligonucleotides
gctgygcggrttttcactctgggttgcgtattgbkggatcaa

SEQ ID NO: 1739 - DNA, 42 bp, Artificial Sequence
  Oligonucleotides
gctgygcggrttttcactctgggttgcgtattgaaggatcaa

SEQ ID NO: 1740 - DNA, 42 bp, Artificial Sequence
  Oligonucleotides
gctgygcggrttttcactctgggttgcgtattgtktgatcaa

SEQ ID NO: 1741 - DNA, 42 bp, Artificial Sequence
  Oligonucleotides
gagtcccaagtcgctaaggaggagagggaaacacctactact

SEQ ID NO: 1742 - DNA, 42 bp, Artificial Sequence
  Oligonucleotides
gatagtatgccgccactgmttcgacaagcttgggaactcmaa

SEQ ID NO: 1743 - DNA, 42 bp, Artificial Sequence
  Oligonucleotides
gatcaccaaggtgcagagccagccttcctgttcggccttgaa

SEQ ID NO: 1744 - DNA, 42 bp, Artificial Sequence
  Oligonucleotides
ttgatcatatgcggattggagaagcagctgaagtgtgaaagt

SEQ ID NO: 1745 - DNA, 26 bp, Artificial Sequence
  Oligonucleotides
gggtcttaaggcgcgccgaagttccc

SEQ ID NO: 1746 - DNA, 42 bp, Artificial Sequence
  Oligonucleotides
cagctccagtgcgctgttgatcaccttgctcttgtcgagtct

SEQ ID NO: 1747 - DNA, 42 bp, Artificial Sequence
  Oligonucleotides
gagtttacgggttgtgaggccttcgattccgacctcgttcag

SEQ ID NO: 1748 - DNA, 42 bp, Artificial Sequence
  Oligonucleotides
gtgccaatacaatgtaggctgctctaccccgagcttctgggc

SEQ ID NO: 1749 - DNA, 42 bp, Artificial Sequence
  Oligonucleotides
ctcaatggccawggcgtctagcagagctcgcttgttcttgac

SEQ ID NO: 1750 - DNA, 42 bp, Artificial Sequence
  Oligonucleotides
cccttccaaagggcagtagtgggtwtggtgcctatccawcat

SEQ ID NO: 1751 - DNA, 42 bp, Artificial Sequence
  Oligonucleotides
cccttccaaagggcagtagtgggtaabgtgcctatccawcat

SEQ ID NO: 1752 - DNA, 42 bp, Artificial Sequence
  Oligonucleotides
sawgctcttagcgttgttcctcaagaagtcttgccagctttc

SEQ ID NO: 1753 - DNA, 42 bp, Artificial Sequence
  Oligonucleotides
ccagctcttagcgttgttcctcaagaagtcttgccagctttc

SEQ ID NO: 1754 - DNA, 42 bp, Artificial Sequence
  Oligonucleotides
gtagctcttagcgttgttcctcaagaagtcttgccagctttc

SEQ ID NO: 1755 - DNA, 42 bp, Artificial Sequence
  Oligonucleotides
sawgctcttagcaabgttcctcaagaagtcttgccagctttc

SEQ ID NO: 1756 - DNA, 42 bp, Artificial Sequence
  Oligonucleotides
ccagctcttagcaabgttcctcaagaagtcttgccagctttc

SEQ ID NO: 1757 - DNA, 42 bp, Artificial Sequence
  Oligonucleotides
gtagctcttagcaabgttcctcaagaagtcttgccagctttc

SEQ ID NO: 1758 - DNA, 42 bp, Artificial Sequence
  Oligonucleotides
scagaccttggctccatcacggtgactgagcaaagcacatct

SEQ ID NO: 1759 - DNA, 42 bp, Artificial Sequence
  Oligonucleotides
caygaccttggctccatcacggtgactgagcaaagcacatct

SEQ ID NO: 1760 - DNA, 42 bp, Artificial Sequence
  Oligonucleotides
ctccrcagwttcatactgttgctccgtcmacgctgtacctag

SEQ ID NO: 1761 - DNA, 42 bp, Artificial Sequence
  Oligonucleotides
ctccrcagwttcatactgttgctccgtgwacgctgtacctag

SEQ ID NO: 1762 - DNA, 42 bp, Artificial Sequence
  Oligonucleotides
ctccrcagwttcatactgttgctccgtcmaccstgtacctag

SEQ ID NO: 1763 - DNA, 42 bp, Artificial Sequence
  Oligonucleotides
ctccrcagwttcatactgttgctccgtgwaccstgtacctag

SEQ ID NO: 1764 - DNA, 42 bp, Artificial Sequence
  Oligonucleotides
ctcaagggagaaaccttgttggcacaggaaggccawcatgtt

SEQ ID NO: 1765 - DNA, 42 bp, Artificial Sequence
  Oligonucleotides
cagagtgaaaayccgcrcagccghgabtgcgtacawggcatt

SEQ ID NO: 1766 - DNA, 42 bp, Artificial Sequence
  Oligonucleotides
cagagtgaaaayccgcrcagcctkgabtgcgtacawggcatt

SEQ ID NO: 1767 - DNA, 42 bp, Artificial Sequence
  Oligonucleotides
cagagtgaaaayccgcrcagcgcrgabtgcgtacawggcatt

SEQ ID NO: 1768 - DNA, 42 bp, Artificial Sequence
  Oligonucleotides
cagagtgaaaayccgcrcagcktcgabtgcgtacawggcatt

SEQ ID NO: 1769 - DNA, 42 bp, Artificial Sequence
  Oligonucleotides
ctccttagcgacttgggactcttgatccmvcaatacgcaacc

SEQ ID NO: 1770 - DNA, 42 bp, Artificial Sequence
  Oligonucleotides
ctccttagcgacttgggactcttgatccttcaatacgcaacc

SEQ ID NO: 1771 - DNA, 42 bp, Artificial Sequence
  Oligonucleotides
ctccttagcgacttgggactcttgatcamacaatacgcaacc

SEQ ID NO: 1772 - DNA, 42 bp, Artificial Sequence
  Oligonucleotides
aakcagtggcggcatactatcagtagtaggtgtttccctctc

SEQ ID NO: 1773 - DNA, 42 bp, Artificial Sequence
  Oligonucleotides
tggctctgcaccttggtgatcttkgagttcccaagcttgtcg

SEQ ID NO: 1774 - DNA, 42 bp, Artificial Sequence
  Oligonucleotides
ctccaatccgcatatgatcaattcaaggccgaacaggaaggc

SEQ ID NO: 1775 - DNA, 42 bp, Artificial Sequence
  Oligonucleotides
cttcggcgcgccttaagacccactttcacacttcagctgctt

SEQ ID NO: 1776 - DNA, 42 bp, Artificial Sequence; identical to SEQ ID NO: 1715
  Oligonucleotides

SEQ ID NO: 1777 - DNA, 42 bp, Artificial Sequence
  Oligonucleotides
ctagacgccttggccattgagatgatggataggcaccaaacc

SEQ ID NO: 1778 - DNA, 42 bp, Artificial Sequence
  Oligonucleotides
cactactygcctttggaaggggaaagctggcaagacttcttg

SEQ ID NO: 1779 - DNA, 42 bp, Artificial Sequence
  Oligonucleotides
aggaacaacgctaagagctgcagacgtgctttgctcagtcac

SEQ ID NO: 1780 - DNA, 42 bp, Artificial Sequence
  Oligonucleotides
aggaacaacgctaagagctgcagaaatgctttgctcagtcac

SEQ ID NO: 1781 - DNA, 42 bp, Artificial Sequence
  Oligonucleotides
cgtgatggagccaaggtctgcctaggtacacggtggacggag

SEQ ID NO: 1782 - DNA, 42 bp, Artificial Sequence
  Oligonucleotides
caacagtatgaatctgcggagaacatgttggccttcctgacc

SEQ ID NO: 1783 - DNA, 42 bp, Artificial Sequence
  Oligonucleotides
caacaaggtttctcccttgagaatgccttgtacgcagtctcc

SEQ ID NO: 1784 - DNA, 42 bp, Artificial Sequence
  Oligonucleotides
gctgtgcgggttttcactctgggttgggtattgttcgatcaa

SEQ ID NO: 1785 - DNA, 42 bp, Artificial Sequence
  Oligonucleotides
gctgtgcgggttttcactctgggtgccgtattgttcgatcaa

SEQ ID NO: 1786 - DNA, 42 bp, Artificial Sequence; identical to SEQ ID NO: 1741
  Oligonucleotides

SEQ ID NO: 1787 - DNA, 42 bp, Artificial Sequence
  Oligonucleotides
gatagtatgccgccactgcttcgacaagcttgggaactcaaa

SEQ ID NO: 1788 - DNA, 42 bp, Artificial Sequence; identical to SEQ ID NO: 1743
  Oligonucleotides

SEQ ID NO: 1789 - DNA, 42 bp, Artificial Sequence
  Oligonucleotides
ttgatcatakccggattggagaagcagctgaagkcagaaagt

SEQ ID NO: 1790 - DNA, 42 bp, Artificial Sequence
  Oligonucleotides
ttgatcatakccggattggagaagcagctgaagagagaaagt

SEQ ID NO: 1791 - DNA, 42 bp, Artificial Sequence
  Oligonucleotides
ttgatcatacgcggattggagaagcagctgaagkcagaaagt

SEQ ID NO: 1792 - DNA, 42 bp, Artificial Sequence
  Oligonucleotides
ttgatcatacgcggattggagaagcagctgaagagagaaagt

SEQ ID NO: 1793 - DNA, 39 bp, Artificial Sequence
  Oligonucleotides
gggtcttaatgatagctgcagaaggtaccttggcgcgcc

SEQ ID NO: 1794 - DNA, 42 bp, Artificial Sequence
  Oligonucleotides
ctcaatggccaaggcgtctagcagagctcgcttgttcttgac

SEQ ID NO: 1795 - DNA, 42 bp, Artificial Sequence
  Oligonucleotides
cccttccaaaggcragtagtgggtttggtgcctatccatcat

SEQ ID NO: 1796 - DNA, 42 bp, Artificial Sequence
  Oligonucleotides
gcagctcttagcgttgttcctcaagaagtcttgccagctttc

SEQ ID NO: 1797 - DNA, 42 bp, Artificial Sequence
  Oligonucleotides
gcagaccttggctccatcacggtgactgagcaaagcacgtct

SEQ ID NO: 1798 - DNA, 42 bp, Artificial Sequence
  Oligonucleotides
gcagaccttggctccatcacggtgactgagcaaagcatttct

SEQ ID NO: 1799 - DNA, 42 bp, Artificial Sequence
  Oligonucleotides
ctccgcagattcatactgttgctccgtccaccgtgtacctag

SEQ ID NO: 1800 - DNA, 42 bp, Artificial Sequence
  Oligonucleotides
ctcaagggagaaaccttgttgggtcaggaaggccaacatgtt

SEQ ID NO: 1801 - DNA, 42 bp, Artificial Sequence
  Oligonucleotides
cagagtgaaaacccgcacagcggagactgcgtacaaggcatt

SEQ ID NO: 1802 - DNA, 42 bp, Artificial Sequence
  Oligonucleotides
ctccttagcgacttgggactcttgatcgaacaatacccaacc

SEQ ID NO: 1803 - DNA, 42 bp, Artificial Sequence
  Oligonucleotides
ctccttagcgacttgggactcttgatcgaacaatacggcacc

SEQ ID NO: 1804 - DNA, 42 bp, Artificial Sequence
  Oligonucleotides
aagcagtggcggcatactatcagtagtaggtgtttccctctc

SEQ ID NO: 1805 - DNA, 42 bp, Artificial Sequence
  Oligonucleotides
tggctctgcaccttggtgatctttgagttcccaagcttgtcg

SEQ ID NO: 1806 - DNA, 42 bp, Artificial Sequence
  Oligonucleotides
ctccaatccggmtatgatcaattcaaggccgaacaggaaggc

SEQ ID NO: 1807 - DNA, 42 bp, Artificial Sequence
  Oligonucleotides
ctccaatccgcgtatgatcaattcaaggccgaacaggaaggc

SEQ ID NO: 1808 - DNA, 42 bp, Artificial Sequence
  Oligonucleotides
ctgcagctatcattaagacccactttctgmcttcagctgctt

SEQ ID NO: 1809 - DNA, 42 bp, Artificial Sequence
  Oligonucleotides
ctgcagctatcattaagacccactttctctcttcagctgctt

SEQ ID NO: 1810 - DNA, 41 bp, Artificial Sequence
  Oligonucleotides
  misc_feature 18, 19: n = A,T,C or G
ccttggccattgagatgnnkgataggcaccaaacccactac

SEQ ID NO: 1811 - DNA, 41 bp, Artificial Sequence
  Oligonucleotides
  misc_feature 23, 24: n = A,T,C or G
gtagtgggtttggtgcctatcmnncatctcaatggccaagg

SEQ ID NO: 1812 - DNA, 39 bp, Artificial Sequence
  Oligonucleotides
  misc_feature 19, 20: n = A,T,C or G
gagatgatggataggcacnnkacccactacttgcctttg

SEQ ID NO: 1813 - DNA, 39 bp, Artificial Sequence
  Oligonucleotides
  misc_feature 20, 21: n = A,T,C or G
caaaggcaagtagtgggtmnngtgcctatccatcatctc

SEQ ID NO: 1814 - DNA, 40 bp, Artificial Sequence
  Oligonucleotides
  misc_feature 19, 20: n = A,T,C or G
caagacttcttgaggaacnnkgctaagagctgcagacgtg

SEQ ID NO: 1815 - DNA, 40 bp, Artificial Sequence
  Oligonucleotides
  misc_feature 21, 22: n = A,T,C or G
cacgtctgcagctcttagcmnngttcctcaagaagtcttg

SEQ ID NO: 1816 - DNA, 41 bp, Artificial Sequence
  Oligonucleotides
  misc_feature 20, 21: n = A,T,C or G
gaggaacaacgctaagagcnnkagacgtgctttgctcagtc

SEQ ID NO: 1817 - DNA, 41 bp, Artificial Sequence
  Oligonucleotides
  misc_feature 21, 22: n = A,T,C or G
gactgagcaaagcacgtctmnngctcttagcgttgttcctc

SEQ ID NO: 1818 - DNA, 39 bp, Artificial Sequence
  Oligonucleotides
  misc_feature 19, 20: n = A,T,C or G
cgtgatggagccaaggtcnnkctaggtacacggtggacg

SEQ ID NO: 1819 - DNA, 39 bp, Artificial Sequence
  Oligonucleotides
  misc_feature 20, 21: n = A,T,C or G
cgtccaccgtgtacctagmnngaccttggctccatcacg

SEQ ID NO: 1820 - DNA, 41 bp, Artificial Sequence
  Oligonucleotides
  misc_feature 20, 21: n = A,T,C or G
caaggtctgcctaggtacannktggacggagcaacagtatg

SEQ ID NO: 1821 - DNA, 41 bp, Artificial Sequence
  Oligonucleotides
  misc_feature 21, 22: n = A,T,C or G
catactgttgctccgtccamnntgtacctaggcagaccttg

SEQ ID NO: 1822 - DNA, 41 bp, Artificial Sequence
  Oligonucleotides
  misc_feature 19, 20: n = A,T,C or G
gtctgcctaggtacacggnnkacggagcaacagtatgaaac

SEQ ID NO: 1823 - DNA, 41 bp, Artificial Sequence
  Oligonucleotides
  misc_feature 22, 23: n = A,T,C or G
gtttcatactgttgctccgtmnnccgtgtacctaggcagac

SEQ ID NO: 1824 - DNA, 40 bp, Artificial Sequence
  Oligonucleotides
  misc_feature 19, 20: n = A,T,C or G
gagcaacagtatgaaactnnkgagaacatgttggccttcc

SEQ ID NO: 1825 - DNA, 40 bp, Artificial Sequence
  Oligonucleotides
  misc_feature 21, 22: n = A,T,C or G
ggaaggccaacatgttctcmnnagtttcatactgttgctc

SEQ ID NO: 1826 - DNA, 41 bp, Artificial Sequence
  Oligonucleotides
  misc_feature 20, 21: n = A,T,C or G
gtatgaaactgcggagaacnnkttggccttcctgacccaac

SEQ ID NO: 1827 - DNA, 41 bp, Artificial Sequence
  Oligonucleotides
  misc_feature 21, 22: n = A,T,C or G
gttgggtcaggaaggccaamnngttctccgcagtttcatac

SEQ ID NO: 1828 - DNA, 41 bp, Artificial Sequence
  Oligonucleotides
  misc_feature 19, 20: n = A,T,C or G
gagaatgccttgtacgcannktccgctgtgcgggttttcac

SEQ ID NO: 1829 - DNA, 41 bp, Artificial Sequence
  Oligonucleotides
  misc_feature 22, 23: n = A,T,C or G
gtgaaaacccgcacagcggamnntgcgtacaaggcattctc

SEQ ID NO: 1830 - DNA, 41 bp, Artificial Sequence
  Oligonucleotides
  misc_feature 20, 21: n = A,T,C or G
gaatgccttgtacgcagtcnnkgctgtgcgggttttcactc

SEQ ID NO: 1831 - DNA, 41 bp, Artificial Sequence
  Oligonucleotides
  misc_feature 21, 22: n = A,T,C or G
gagtgaaaacccgcacagcmnngactgcgtacaaggcattc

SEQ ID NO: 1832 - DNA, 40 bp, Artificial Sequence
  Oligonucleotides
  misc_feature 20, 21: n = A,T,C or G
gtacgcagtctccgctgtgnnkgttttcactctgggtgcc

SEQ ID NO: 1833 - DNA, 40 bp, Artificial Sequence
  Oligonucleotides
  misc_feature 20, 21: n = A,T,C or G
ggcacccagagtgaaaacmnncacagcggagactgcgtac

SEQ ID NO: 1834 - DNA, 41 bp, Artificial Sequence
  Oligonucleotides
  misc_feature 21, 22: n = A,T,C or G
acgcagtctccgctgtgcggnnkttcactctgggtgccgta

SEQ ID NO: 1835 - DNA, 41 bp, Artificial Sequence
  Oligonucleotides
  misc_feature 20, 21: n = A,T,C or G
tacggcacccagagtgaamnnccgcacagcggagactgcgt

SEQ ID NO: 1836 - DNA, 40 bp, Artificial Sequence
  Oligonucleotides
  misc_feature 20, 21: n = A,T,C or G
cactctgggtgccgtattgnnkgatcaagagtcccaagtc

SEQ ID NO: 1837 - DNA, 40 bp, Artificial Sequence
  Oligonucleotides
  misc_feature 20, 21: n = A,T,C or G
gacttgggactcttgatcmnncaatacggcacccagagtg

SEQ ID NO: 1838 - DNA, 42 bp, Artificial Sequence
  Oligonucleotides
  misc_feature 20, 21: n = A,T,C or G
cgtattgttcgatcaagagnnkcaagtcgctaaggaggagag

SEQ ID NO: 1839 - DNA, 42 bp, Artificial Sequence
  Oligonucleotides
  misc_feature 22, 23: n = A,T,C or G
ctctcctccttagcgacttgmnnctcttgatcgaacaatacg

SEQ ID NO: 1840 - DNA, 41 bp, Artificial Sequence
  Oligonucleotides
  misc_feature 20, 21: n = A,T,C or G
gccactgcttcgacaagctnnkgaactcaaagatcaccaag

SEQ ID NO: 1841 - DNA, 41 bp, Artificial Sequence
  Oligonucleotides
  misc_feature 21, 22: n = A,T,C or G
cttggtgatctttgagttcmnnagcttgtcgaagcagtggc

SEQ ID NO: 1842 - DNA, 41 bp, Artificial Sequence
  Oligonucleotides
  misc_feature 20, 21: n = A,T,C or G
tcgacaagcttgggaactcnnkgatcaccaaggtgcagagc

SEQ ID NO: 1843 - DNA, 41 bp, Artificial Sequence
  Oligonucleotides
  misc_feature 21, 22: n = A,T,C or G
gctctgcaccttggtgatcmnngagttcccaagcttgtcga

SEQ ID NO: 1844 - DNA, 42 bp, Artificial Sequence
  Oligonucleotides
tggcacgtcaagaacaagcgagctctgctagacgccttggcc

SEQ ID NO: 1845 - DNA, 42 bp, Artificial Sequence
  Oligonucleotides
attgagatgmatgataggcacrgcacccactacttgcctttg

SEQ ID NO: 1846 - DNA, 42 bp, Artificial Sequence
  Oligonucleotides
attgagatgmatgataggcaccagacccactacttgcctttg

SEQ ID NO: 1847 - DNA, 42 bp, Artificial Sequence
  Oligonucleotides
attgagatgatggataggcacrgcacccactacttgcctttg

SEQ ID NO: 1848 - DNA, 42 bp, Artificial Sequence
  Oligonucleotides
attgagatgatggataggcaccagacccactacttgcctttg

SEQ ID NO: 1849 - DNA, 42 bp, Artificial Sequence
  Oligonucleotides
gaaggggaaagctggcaagacttcttgaggaactwcgctaag

SEQ ID NO: 1850 - DNA, 42 bp, Artificial Sequence
  Oligonucleotides
agctcccgacgtgctttgctcagtcaccgtgatggagccaag

SEQ ID NO: 1851 - DNA, 42 bp, Artificial Sequence
  Oligonucleotides
agcatgcgacgtgctttgctcagtcaccgtgatggagccaag

SEQ ID NO: 1852 - DNA, 42 bp, Artificial Sequence
  Oligonucleotides
gtckcgcttggtacacggtggacggagcaacagtatgaaact

SEQ ID NO: 1853 - DNA, 42 bp, Artificial Sequence
  Oligonucleotides
gsagagaacwtgttggccttcctgacccaacaaggtttctcc

SEQ ID NO: 1854 - DNA, 42 bp, Artificial Sequence
  Oligonucleotides
cttgagaatgccttgtacgcaaccgrcgctgtgcrtrttttc

SEQ ID NO: 1855 - DNA, 42 bp, Artificial Sequence
  Oligonucleotides
cttgagaatgccttgtacgcaacctcagctgtgcrtrttttc

SEQ ID NO: 1856 - DNA, 42 bp, Artificial Sequence
  Oligonucleotides
cttgagaatgccttgtacgcastggrcgctgtgcrtrttttc

SEQ ID NO: 1857 - DNA, 42 bp, Artificial Sequence
  Oligonucleotides
cttgagaatgccttgtacgcastgtcagctgtgcrtrttttc

SEQ ID NO: 1858 - DNA, 42 bp, Artificial Sequence
  Oligonucleotides
actctgggtgccgtattggtggatcaagagrgccaagtcgct

SEQ ID NO: 1859 - DNA, 42 bp, Artificial Sequence
  Oligonucleotides
actctgggtgccgtattggtggatcaagagcagcaagtcgct

SEQ ID NO: 1860 - DNA, 42 bp, Artificial Sequence
  Oligonucleotides
actctgggtgccgtattgcaagatcaagagrgccaagtcgct

SEQ ID NO: 1861 - DNA, 42 bp, Artificial Sequence
  Oligonucleotides
actctgggtgccgtattgcaagatcaagagcagcaagtcgct

SEQ ID NO: 1862 - DNA, 42 bp, Artificial Sequence; identical to SEQ ID NO: 1017
  Oligonucleotides

SEQ ID NO: 1863 - DNA, 42 bp, Artificial Sequence
  Oligonucleotides
ctgcttcgacaagcctgggaactcaaagatcaccaaggtgca

SEQ ID NO: 1864 - DNA, 42 bp, Artificial Sequence
  Oligonucleotides
gagccagccttcctgttcggccttgaattgatcatagccgga

SEQ ID NO: 1865 - DNA, 42 bp, Artificial Sequence
  Oligonucleotides
ttggagaagcagctgaagagagaaagtgggtctcaccatcac

SEQ ID NO: 1866 - DNA, 42 bp, Artificial Sequence
  Oligonucleotides
gtgcctatcatkcatctcaatggccaaggcgtctagcagagc

SEQ ID NO: 1867 - DNA, 42 bp, Artificial Sequence
  Oligonucleotides
gtgcctatccatcatctcaatggccaaggcgtctagcagagc

SEQ ID NO: 1868 - DNA, 42 bp, Artificial Sequence
  Oligonucleotides
gtcttgccagctttccccttccaaaggcaagtagtgggtgct

SEQ ID NO: 1869 - DNA, 42 bp, Artificial Sequence
  Oligonucleotides
gtcttgccagctttccccttccaaaggcaagtagtgggtgcc

SEQ ID NO: 1870 - DNA, 42 bp, Artificial Sequence
  Oligonucleotides
gtcttgccagctttccccttccaaaggcaagtagtgggtctg

SEQ ID NO: 1871 - DNA, 42 bp, Artificial Sequence
  Oligonucleotides
gagcaaagcacgtcgggagctcttagcgwagttcctcaagaa

SEQ ID NO: 1872 - DNA, 42 bp, Artificial Sequence
  Oligonucleotides
gagcaaagcacgtcgcatgctcttagcgwagttcctcaagaa

SEQ ID NO: 1873 - DNA, 42 bp, Artificial Sequence
  Oligonucleotides
ccaccgtgtaccaagcgmgaccttggctccatcacggtgact

SEQ ID NO: 1874 - DNA, 42 bp, Artificial Sequence
  Oligonucleotides
gaaggccaacawgttctctscagtttcatactgttgctccgt

SEQ ID NO: 1875 - DNA, 42 bp, Artificial Sequence
  Oligonucleotides
tgcgtacaaggcattctcaagggagaaaccttgttgggtcag

SEQ ID NO: 1876 - DNA, 42 bp, Artificial Sequence
  Oligonucleotides
caccaatacggcacccagagtgaaaayaygcacagcgycggt

SEQ ID NO: 1877 - DNA, 42 bp, Artificial Sequence
  Oligonucleotides
ttgcaatacggcacccagagtgaaaayaygcacagcgycggt

SEQ ID NO: 1878 - DNA, 42 bp, Artificial Sequence
  Oligonucleotides
caccaatacggcacccagagtgaaaayaygcacagctgaggt

SEQ ID NO: 1879 - DNA, 42 bp, Artificial Sequence
  Oligonucleotides
ttgcaatacggcacccagagtgaaaayaygcacagctgaggt

SEQ ID NO: 1880 - DNA, 42 bp, Artificial Sequence
  Oligonucleotides
caccaatacggcacccagagtgaaaayaygcacagcgyccac

SEQ ID NO: 1881 - DNA, 42 bp, Artificial Sequence
  Oligonucleotides
caccaatacggcacccagagtgaaaayaygcacagcgyccag

SEQ ID NO: 1882 - DNA, 42 bp, Artificial Sequence
  Oligonucleotides
ttgcaatacggcacccagagtgaaaayaygcacagcgyccac

SEQ ID NO: 1883 - DNA, 42 bp, Artificial Sequence
  Oligonucleotides
ttgcaatacggcacccagagtgaaaayaygcacagcgyccag

SEQ ID NO: 1884 - DNA, 42 bp, Artificial Sequence
  Oligonucleotides
caccaatacggcacccagagtgaaaayaygcacagctgacac

SEQ ID NO: 1885 - DNA, 42 bp, Artificial Sequence
  Oligonucleotides
caccaatacggcacccagagtgaaaayaygcacagctgacag

SEQ ID NO: 1886 - DNA, 42 bp, Artificial Sequence
  Oligonucleotides
ttgcaatacggcacccagagtgaaaayaygcacagctgacac

SEQ ID NO: 1887 - DNA, 42 bp, Artificial Sequence
  Oligonucleotides
ttgcaatacggcacccagagtgaaaayaygcacagctgacag

SEQ ID NO: 1888 - DNA, 42 bp, Artificial Sequence
  Oligonucleotides
aggtgtttccctctcctccttagcgacttggcyctcttgatc

SEQ ID NO: 1889 - DNA, 42 bp, Artificial Sequence
  Oligonucleotides
aggtgtttccctctcctccttagcgacttgctgctcttgatc

SEQ ID NO: 1890 - DNA, 42 bp, Artificial Sequence
  Oligonucleotides
ttcccaggcttgtcgaagcagtggcggcatactatcagtagt

SEQ ID NO: 1891 - DNA, 42 bp, Artificial Sequence
  Oligonucleotides
gccgaacaggaaggctggctctgcaccttggtgatctttgag

SEQ ID NO: 1892 - DNA, 42 bp, Artificial Sequence
  Oligonucleotides
tctcttcagctgcttctccaatccggctatgatcaattcaag

SEQ ID NO: 1893 - DNA, 45 bp, Artificial Sequence
  Oligonucleotides
cacaggcgcgccttagtgatggtggtgatggtgagacccactttc

SEQ ID NO: 1894 - DNA, 42 bp, Artificial Sequence; identical to SEQ ID NO: 1844
  Oligonucleotides

SEQ ID NO: 1895 - DNA, 42 bp, Artificial Sequence
  Oligonucleotides
attgagatgcatgataggcacggaacccactacttgcctttg

SEQ ID NO: 1896 - DNA, 42 bp, Artificial Sequence
  Oligonucleotides
attgagatgcatgataggcaccaaacccactacttgcctttg

SEQ ID NO: 1897 - DNA, 42 bp, Artificial Sequence
  Oligonucleotides
attgagatgatggataggcacggaacccactacttgcctttg

SEQ ID NO: 1898 - DNA, 42 bp, Artificial Sequence
  Oligonucleotides
attgagatgatggataggcaccaaacccactacttgcctttg

SEQ ID NO: 1899 - DNA, 42 bp, Artificial Sequence
  Oligonucleotides
gaaggggaaagctggcaagactwtttgaggaactwtgctaag

SEQ ID NO: 1900 - DNA, 42 bp, Artificial Sequence
  Oligonucleotides
agcatgcgackagctttgctcagtcaccgtgatggagccaag

SEQ ID NO: 1901 - DNA, 42 bp, Artificial Sequence
  Oligonucleotides
agcatgcgatgcgctttgctcagtcaccgtgatggagccaag

SEQ ID NO: 1902 - DNA, 42 bp, Artificial Sequence
  Oligonucleotides
gtckcccttggtacacggtggacggagcaacagtatgaaact

SEQ ID NO: 1903 - DNA, 42 bp, Artificial Sequence
  Oligonucleotides
gcggagaacatgttggccttcctgacccaacaaggtttctcc

SEQ ID NO: 1904 - DNA, 42 bp, Artificial Sequence
  Oligonucleotides
cttgagaatgccttgtacgcaacagatgctgtgcgggttttc

SEQ ID NO: 1905 - DNA, 42 bp, Artificial Sequence
  Oligonucleotides
cttgagaatgccttgtacgcaacaagcgctgtgcgggttttc

SEQ ID NO: 1906 - DNA, 42 bp, Artificial Sequence
  Oligonucleotides
actctgggtgccgtattgcwggatcaagagggacaagtcgct

SEQ ID NO: 1907 - DNA, 42 bp, Artificial Sequence
  Oligonucleotides
actctgggtgccgtattgcwggatcaagagcaacaagtcgct

SEQ ID NO: 1908 - DNA, 42 bp, Artificial Sequence
  Oligonucleotides
aakgaggagagggaaacacctactmctgatagwatgccgcca

SEQ ID NO: 1909 - DNA, 42 bp, Artificial Sequence
  Oligonucleotides
ctgcttcgacaagcctgggaactcaaagwkcaccaaggtgca

SEQ ID NO: 1910 - DNA, 42 bp, Artificial Sequence; identical to SEQ ID NO: 1864
  Oligonucleotides

SEQ ID NO: 1911 - DNA, 42 bp, Artificial Sequence; identical to SEQ ID NO: 1865
  Oligonucleotides

SEQ ID NO: 1912 - DNA, 42 bp, Artificial Sequence
  Oligonucleotides
gtgcctatcatgcatctcaatggccaaggcgtctagcagagc

SEQ ID NO: 1913 - DNA, 42 bp, Artificial Sequence; identical to SEQ ID NO: 1867
  Oligonucleotides

SEQ ID NO: 1914 - DNA, 42 bp, Artificial Sequence
  Oligonucleotides
gtcttgccagctttccccttccaaaggcaagtagtgggttcc

SEQ ID NO: 1915 - DNA, 42 bp, Artificial Sequence
  Oligonucleotides
gtcttgccagctttccccttccaaaggcaagtagtgggtttg

SEQ ID NO: 1916 - DNA, 42 bp, Artificial Sequence
  Oligonucleotides
gagcaaagctmgtcgcatgctcttagcawagttcctcaaawa

SEQ ID NO: 1917 - DNA, 42 bp, Artificial Sequence
  Oligonucleotides
gagcaaagcgcatcgcatgctcttagcawagttcctcaaawa

SEQ ID NO: 1918 - DNA, 42 bp, Artificial Sequence
  Oligonucleotides
ccaccgtgtaccaagggmgaccttggctccatcacggtgact

SEQ ID NO: 1919 - DNA, 42 bp, Artificial Sequence
  Oligonucleotides
gaaggccaacatgttctccgcagtttcatactgttgctccgt

SEQ ID NO: 1920 - DNA, 42 bp, Artificial Sequence; identical to SEQ ID NO: 1875
  Oligonucleotides

SEQ ID NO: 1921 - DNA, 42 bp, Artificial Sequence
  Oligonucleotides
cwgcaatacggcacccagagtgaaaacccgcacagcatctgt

SEQ ID NO: 1922 - DNA, 42 bp, Artificial Sequence
  Oligonucleotides
cwgcaatacggcacccagagtgaaaacccgcacagcgcttgt

SEQ ID NO: 1923 - DNA, 42 bp, Artificial Sequence
  Oligonucleotides
aggtgtttccctctcctcmttagcgacttgtccctcttgatc

SEQ ID NO: 1924 - DNA, 42 bp, Artificial Sequence
  Oligonucleotides
aggtgtttccctctcctcmttagcgacttgttgctcttgatc

SEQ ID NO: 1925 - DNA, 42 bp, Artificial Sequence
  Oligonucleotides
ttcccaggcttgtcgaagcagtggcggcatwctatcagkagt

SEQ ID NO: 1926 - DNA, 42 bp, Artificial Sequence
  Oligonucleotides
gccgaacaggaaggctggctctgcaccttggtgmwctttgag

SEQ ID NO: 1927 - DNA, 42 bp, Artificial Sequence; identical to SEQ ID NO: 1892
  Oligonucleotides

SEQ ID NO: 1928 - DNA, 45 bp, Artificial Sequence; identical to SEQ ID NO: 1893
  Oligonucleotides

SEQ ID NO: 1929 - DNA, 40 bp, Artificial Sequence
  Oligonucleotides
  misc_feature 19, 20: n = A,T,C or G
gctctgctagacgccttgnnkattgagatgcatgataggc

SEQ ID NO: 1930 - DNA, 40 bp, Artificial Sequence
  Oligonucleotides
  misc_feature 21, 22: n = A,T,C or G
gcctatcatgcatctcaatmnncaaggcgtctagcagagc

SEQ ID NO: 1931 - DNA, 37 bp, Artificial Sequence
  Oligonucleotides
  misc_feature 19, 20: n = A,T,C or G
gccaaggtctcccttggtnnkcggtggacggagcaac

SEQ ID NO: 1932 - DNA, 37 bp, Artificial Sequence
  Oligonucleotides
  misc_feature 18, 19: n = A,T,C or G
gttgctccgtccaccgmnnaccaagggagaccttggc

SEQ ID NO: 1933 - DNA, 35 bp, Artificial Sequence
  Oligonucleotides
  misc_feature 18, 19: n = A,T,C or G
ggtggacggagcaacagnnkgaaactgcggagaac

SEQ ID NO: 1934 - DNA, 35 bp, Artificial Sequence
  Oligonucleotides
  misc_feature 17, 18: n = A,T,C or G
gttctccgcagtttcmnnctgttgctccgtccacc

SEQ ID NO: 1935 - DNA, 37 bp, Artificial Sequence
  Oligonucleotides
  misc_feature 19, 20: n = A,T,C or G
gaaactgcggagaacatgnnkgccttcctgacccaac

SEQ ID NO: 1936 - DNA, 37 bp, Artificial Sequence
  Oligonucleotides
  misc_feature 18, 19: n = A,T,C or G
gttgggtcaggaaggcmnncatgttctccgcagtttc

SEQ ID NO: 1937 - DNA, 38 bp, Artificial Sequence
  Oligonucleotides
  misc_feature 22, 23: n = A,T,C or G
ggtttctcccttgagaatgccnnktacgcaacagatgc

SEQ ID NO: 1938 - DNA, 38 bp, Artificial Sequence
  Oligonucleotides
  misc_feature 16, 17: n = A,T,C or G
gcatctgttgcgtamnnggcattctcaagggagaaacc

SEQ ID NO: 1939 - DNA, 37 bp, Artificial Sequence
  Oligonucleotides
  misc_feature 17, 18: n = A,T,C or G
gaatgccttgtacgcannkgatgctgtgcgggttttc

SEQ ID NO: 1940 - DNA, 37 bp, Artificial Sequence
  Oligonucleotides
  misc_feature 20, 21: n = A,T,C or G
gaaaacccgcacagcatcmnntgcgtacaaggcattc

SEQ ID NO: 1941 - DNA, 35 bp, Artificial Sequence
  Oligonucleotides
  misc_feature 16, 17: n = A,T,C or G
gcaacagatgctgtgnnkgttttcactctgggtgc

SEQ ID NO: 1942 - DNA, 35 bp, Artificial Sequence
  Oligonucleotides
  misc_feature 19, 20: n = A,T,C or G
gcacccagagtgaaaacmnncacagcatctgttgc

SEQ ID NO: 1943 - DNA, 34 bp, Artificial Sequence
  Oligonucleotides
  misc_feature 16, 17: n = A,T,C or G
gaggagagggaaacannkactcctgatagtatgc

SEQ ID NO: 1944 - DNA, 34 bp, Artificial Sequence
  Oligonucleotides
  misc_feature 18, 19: n = A,T,C or G
gcatactatcaggagtmnntgtttccctctcctc

SEQ ID NO: 1945 - DNA, 37 bp, Artificial Sequence
  Oligonucleotides
  misc_feature 22, 23: n = A,T,C or G
gaaacacctactcctgatagtnnkccgccactgcttc

SEQ ID NO: 1946 - DNA, 37 bp, Artificial Sequence
  Oligonucleotides
  misc_feature 15, 16: n = A,T,C or G
gaagcagtggcggmnnactatcaggagtaggtgtttc

SEQ ID NO: 1947 - DNA, 35 bp, Artificial Sequence
  Oligonucleotides
  misc_feature 17, 18: n = A,T,C or G
gccactgcttcgacaannktgggaactcaaagttc

SEQ ID NO: 1948 - DNA, 35 bp, Artificial Sequence
  Oligonucleotides
  misc_feature 18, 19: n = A,T,C or G
gaactttgagttcccamnnttgtcgaagcagtggc

SEQ ID NO: 1949 - DNA, 621 bp, Artificial Sequence
  Nucleotides Encoding Sulfonylurea responsive repressor
atggccagactcgacaagagcaaggtgatcaacagcgcactggagctgctgaacgaggtcggaatcgaaggcctcacaacccgtaagctcgcccagaagctcggggttgagcagcctacattgtactggcacgtcaagaacaagcgagctctgctagacgccttggccattgagatgatggataggcaccaaacccactactcgcctttggaaggggaaagctggcaagacttcttgaggaacaacgctaagagctgcagaaatgctttgctcagtcaccgtgatggagccaaggtctgcctaggtacacggtggacggagcaacagtatgaatctgcggagaacatgttggccttcctgacccaacaaggtttctcccttgagaatgccttgtacgcactcgacgctgtgcgggttttcactctgggtgccgtattgttcgatcaagagtcccaagtcgctaaggaggagagggaaacacctactactgatagtatgccgccactgcttcgacaagcttgggaactcaaagatcaccaaggtgcagagccagccttcctgttcggccttgaattgatcatagccggattggagaagcagctgaagagagaaagtgggtct

SEQ ID NO: 1950 - DNA, 621 bp, Artificial Sequence
  Nucleotides Encoding Sulfonylurea responsive repressor
atggccagactcgacaagagcaaggtgatcaacagcgcactggagctgctgaacgaggtcggaatcgaaggcctcacaacccgtaagctcgcccagaagctcggggttgagcagcctacattgtactggcacgtcaagaacaagcgagctctgctagacgccttggccattgagatgatggataggcaccaaacccactacttgcctttggaaggggaaagctggcaagacttcttgaggaacaacgctaagagctgcagaaatgctttgctcagtcaccgtgatggagccaaggtctgcctaggtacacggtggacggagcaacagtatgaaactgcggagaacatgttggccttcctgacccaacaaggtttctcccttgagaatgccttgtacgcactcgaagctgcgcgggttttcactctgggtgccgtattgttcgatcaagagtcccaagtcgctaaggaggagagggaaacacctactactgatagtatgccgccactgcttcgacaagcttgggaactcaaagatcaccaaggtgcagagccagccttcctgttcggccttgaattgatcatatccggattggagaagcagctgaagagagaaagtgggtct

SEQ ID NO: 1951 - DNA, 621 bp, Artificial Sequence
  Nucleotides Encoding Sulfonylurea responsive repressor
atggccagactcgacaagagcaaggtgatcaacagcgcactggagctgctgaacgaggtcggaatcgaaggcctcacaacccgtaagctcgcccagaagctcggggttgagcagcctacattgtactggcacgtcaagaacaagcgagctctgctagacgccttggccattgagatgatggataggcaccaaacccactactcgcctttggaaggggaaagctggcaagacttcttgaggaacaacgctaagagctgcagacgtgctttgctcagtcaccgtgatggagccaaggtctgcctaggtacacggtggacggagcaacagtatgaatctgcggagaacatgttggccttcctgacccaacaaggtttctcccttgagaatgccttgtacgcagtcgacgctgtgcgggttttcactctgggtgccgtattgttcgatcaagagtcccaagtcgctaaggaggagagggaaacacctactactgatagtatgccgccactgcttcgacaagcttgggaactcaaagatcaccaaggtgcagagccagccttcctgttcggccttgaattgatcatagccggattggagaagcagctgaaggcagaaagtgggtct

SEQ ID NO: 1952 - DNA, 621 bp, Artificial Sequence
  Nucleotides Encoding Sulfonylurea responsive repressor
atggccagactcgacaagagcaaggtgatcaacagcgcactggagctgctgaacgaggtcggaatcgaaggcctcacaacccgtaagctcgcccagaagctcggggttgagcagcctacattgtactggcacgtcaagaacaagcgagctctgctagacgccttggccattgagatgatggataggcaccaaacccactactcgcctttggaaggggaaagctggcaagacttcttgaggaacaacgctaagagctgcagacgtgctgtgctcagtcaccgtgatggagccaaggtctgcctaggtacacggtggacggagcaacagtatgaatctgcggagaacatgttggccttcctgacccaacaaggtttctcccttgagaatgccttgtacgcagtctccgctgtgcgggttttcactctgggtgccgtattgttcgatcaagagtcccaagtcgctaaggaggagagggaaacacctactactgatagtatgccgccactgcttcgacaagcttgggaactcaaagatcaccaaggtgcagagccagccttcctgttcggccttgaattgatcatagccggattggagaagcagctgaagagagaaagtgggtct

SEQ ID NO: 1953 - DNA, 621 bp, Artificial Sequence
  Nucleotides Encoding Sulfonylurea responsive repressor
atggccagactcgacaagagcaaggtgatcaacagcgcactggagctgctgaacgaggtcggaatcgaaggcctcacaacccgtaagctcgcccagaagctcggggttgagcagcctacattgtactggcacgtcaagaacaagcgagctctgctagacgccttggccattgagatgatggataggcaccaaacccactactcgcctttggaaggggaaagctggcaagacttcttgaggaacaacgctaagagctggagatgtgctttgctcagtcaccgtgatggagccaaggtctgcctaggtacacggtggacggagcaacagtatgaatctgcggagaacatgttggccttcctgacccaacaaggtttctcccttgagaatgccttgtacgcactcgaagctgtgcgggttttcactctgggttgggtattgttcgatcaagagtcccaagtcgctaaggaggagagggaaacacctactactgatagtatgccgccactgcttcgacaagcttgggaactcaaagatcaccaaggtgcagagccagccttcctgttcggccttgaattgatcatagccggattggagaagcagctgaaggcagaaagtgggtct

SEQ ID NO: 1954 - DNA, 621 bp, Artificial Sequence
  Nucleotides Encoding Sulfonylurea responsive repressor
atggccagactcgacaagagcaaggtgatcaacagcgcactggagctgctgaacgaggtcggaatcgaaggcctcacaacccgtaagctcgcccagaagctcggggttgagcagcctacattgtactggcacgtcaagaacaagcgagctctgctagacgccttggccattgagatgatggataggcaccaaacccactacttgcctttggaaggggaaagctggcaagacttcttgaggaacaacgctaagagctgcagacgtgctttgctcagtcaccgtgatggagccaaggtctgcctaggtacacggtggacggagcaacagtatgaatctgcggagaacatgttggccttcctgacccaacaaggtttctcccttgagaatgccttgtacgcagtctccgctgtgcgggttttcactctgggttgcgtattgtgggatcaagagtcccaagtcgctaaggaggagagggaaacacctactactgatagtatgccgccactgcttcgacaagcttgggaactcaaagatcaccaaggtgcagagccagccttcctgttcggccttgaattgatcatacgcggattggagaagcagctgaaggcagaaagtgggtct

SEQ ID NO: 1955 - DNA, 621 bp, Artificial Sequence
  Nucleotides Encoding Sulfonylurea responsive repressor
  misc_feature 431, 607: n = A,T,C or G
atggccagactcgacaagagcaaggtgatcaacagcgcactggagctgctgaacgaggtcggaatcgaaggcctcacaacccgtaagctcgcccagaagctcggggttgagcagcctacattgtactggcacgtcaagaacaagcgagctcttctagacgccttggccattgagatgatggataggcaccaaacccactacttgcctttggaaggggaaagctggcaagacttcttgaggaaccttgctaagagcatgagatgtgctttgctcagtcaccgtgatggagccaaggtctgcctaggtacacggtggacggagcaacagtatgaatctgcggagaacatgttggccttcctgacccaacaaggtttctcccttgagaatgccttgtacgcagtctccgctgtgcgggttttcactctgggtgncgtattgttcgatcaagagtcccaagtcgctaaggaggagagggaaacacctactactgatagtatgccgccactgcttcgacaagcttgggaactcaaagatcaccaaggtgcagagccagccttcctgttcggccttgaattgatcatatccggattggagaagcagctgaagncagaaagtgggtct

SEQ ID NO: 1956 - DNA, 621 bp, Artificial Sequence
  Nucleotides Encoding Sulfonylurea responsive repressor
atggccagactcgacaagagcaaggtgatcaacagcgcactggagctgctgaacgaggtcggaatcgaaggcctcacaacccgtaagctcgcccagaagctcggggttgagcagcctacattgtactggcacgtcaagaacaagcgagctctgctagacgccttggccattgagatgatggataggcaccaaacccactacttgcctttggaaggggaaagctggcaagacttcttgaggaacaacgctaagagctgcagacgtgctttgctcagtcaccgtgatggagccaaggtctgcctaggtacacggtggacggagcaacagtatgaatctgcggagaacatgttggccttcctgtgccaacaaggtttctcccttgagaatgccttgtacgcagtctccgctgtgcgggttttcactctgggtgccgtattgttcgatcaagagtcccaagtcgctaaggaggagagggaaacacctactactgatagtatgccgccactgcttcgacaagcttgggaactcaaagatcaccaaggtgcagagccagccttcctgttcggccttgaattgatcatacgcggattggagaagcagctgaaggcagaaagtgggtct

SEQ ID NO: 1957 - DNA, 621 bp, Artificial Sequence
  Nucleotides Encoding Sulfonylurea responsive repressor
atggccagactcgacaagagcaaggtgatcaacagcgcactggagctgctgaacgaggtcggaatcgaaggcctcacaacccgtaagctcgcccagaagctcggggttgagcagcctacattgtactggcacgtcaagaacaagcgagctctgctagacgccttggccattgagatgatggataggcaccaaacccactactcgcctttggaaggggaaagctggcaagacttcttgaggaacaacgctaagagctgcagacgtgctttgctcagtcaccgtgatggagccaaggtctgcctaggtacacggtggacggagcaacagtatgaatctgcggagaacatgttggccttcctgacccaacaaggtttctcccttgagaatgccttgtacgcactcacggctgcgcgggttttcactctgggttgggtattgttcgatcaagagtcccaagtcgctaaggaggagagggaaacacctactactgatagtatgccgccactgcttcgacaagcttgggaactcaaagatcaccaaggtgcagagccagccttcctgttcggccttgaattgatcatatccggattggagaagcagctgaagtcagaaagtgggtct

SEQ ID NO: 1958 - DNA, 621 bp, Artificial Sequence
  Nucleotides Encoding Sulfonylurea responsive repressor
atggccagactcgacaagagcaaggtgatcaacagcgcactggagctgctgaacgaggtcggaatcgaaggcctcacaacccgtaagctcgcccagaagctcggggttgagcagcctacattgtactggcacgtcaagaacaagcgagctctgctagacgccttggccattgagatgatggataggcaccaaacccactactcgcctttggaaggggaaagctggcaagacttcttgaggaacaacgctaagagctgcagaaatgctttgctcagtcaccgtgatggagccaaggtctgcctaggtacacggtggacggagcaacagtatgaatctgcggagaacatgttggccttcctgacccaacaaggtttctcccttgagaatgccttgtacgcagtctccgctgtgcgggttttcactctgggtgccgtattgtacgatcaagagtcccaagtcgctaaggaggagagggaaacacctactactgatagtatgccgccactgcttcgacaagcttgggaactcaaagatcaccaaggtgcagagccagccttcctgttcggccttgaattgatcatacgcggattggagaagcagctgaaggcagaaagtgggtct

SEQ ID NO: 1959 - DNA, 621 bp, Artificial Sequence
  Nucleotides Encoding Sulfonylurea responsive repressor
atggccagactcgacaagagcaaggtgatcaacagcgcactggagctgctgaacgaggtcggaatcgaaggcctcacaacccgtaagctcgcccagaagctcggggttgagcagcctacattgtactggcacgtcaagaacaagcgagctctgctagacgccttggccattgagatgatggataggcaccaaacccactacttgcctttggaaggggaaagctggcaagacttcttgaggaacaacgctaagagctgcagaaatgctttgctcagtcaccgtgatggagccaaggtctgcctaggtacacggtggacggagcaacagtatgaatctgcggagaacatgttggccttcctgacccaacaaggtttctcccttgagaatgccttgtacgcagtctccgctgtgcgggttttcactctgggtgccgtattgtacgatcaagagtcccaagtcgctaaggaggagagggaaacacctactactgatagtatgccgccactgcttcgacaagcttgggaactcaaagatcaccaaggtgcagagccagccttcctgttcggccttgaattgatcatacgcggattggagaagcagctgaaggcagaaagtgggtct

SEQ ID NO: 1960 - DNA, 621 bp, Artificial Sequence
  Nucleotides Encoding Sulfonylurea responsive repressor
atggccagactcgacaagagcaaggtgatcaacagcgcactggagctgctgaacgaggtcggaatcgaaggcctcacaacccgtaagctcgcccagaagctcggggttgagcagcctacattgtactggcacgtcaagaacaagcgagctctgctagacgccttggccattgagatgatggataggcaccaaacccactacttgcctttggaaggggaaagctggcaagacttcttgaggaacaacgctaagagctgcagacgtgctttgctcagtcaccgtgatggagccaaggtctgcctaggtacacggtggacggagcaacagtatgaaactgcggagaacatgttggccttcctgacccaacaaggtttctcccttgagaatgccttgtacgcagtctccgctgtgcgggttttcactctgggtgccgtattgttcgatcaagagtcccaagtcgctaaggaggagagggaaacacctactactgatagtatgccgccactgcttcgacaagcttgggaactcaaagatcaccaaggtgcagagccagccttcctgttcggccttgaattgatcatacgcggattggagaagcagctgaagagagaaagtgggtct

SEQ ID NO: 1961 - DNA, 621 bp, Artificial Sequence
  Nucleotides Encoding Sulfonylurea responsive repressor
atggccagactcgacaagagcaaggtgatcaacagcgcactggagctgctgaacgaggtcggaatcgaaggcctcacaacccgtaagctcgcccagaagctcggggttgagcagcctacattgtactggcacgtcaagaacaagcgagctctgctagacgccttggccattgagatgatggataggcaccaaacccactactcgcctttggaaggggaaagctggcaagacttcttgaggaacaacgctaagagctgcagaaatgctttgctcagtcaccgtgatggagccaaggtctgcctaggtacacggtggacggagcaacagtatgaatctgcggagaacatgttggccttcctgacccaacaaggtttctcccttgagaatgccttgtacgcactccaggctgtgcgggttttcactctgggtgccgtattgttcgatcaagagtcccaagtcgctaaggaggagagggaaacacctactactgatagtatgccgccactgcttcgacaagcttgggaactcaaagatcaccaaggtgcagagccagccttcctgttcggccttgaattgatcatagccggattggagaagcagctgaagagagaaagtgggtct

SEQ ID NO: 1962 - DNA, 621 bp, Artificial Sequence
  Nucleotides Encoding Sulfonylurea responsive repressor
atggccagactcgacaagagcaaggtgatcaacagcgcactggagctgctgaacgaggtcggaatcgaaggcctcacaacccgtaagctcgcccagaagctcggggttgagcagcctacattgtactggcacgtcaagaacaagcgagctctgctagacgccttggccattgagatgatggataggcaccaaacccactacttgcctttggaaggggaaagctggcaagacttcttgaggaacaacgctaagagctgcagacgtgctttgctcagtcaccgtgatggagccaaggtctgcctaggtacacggtggacggagcaacagtatgaaactgcggagaacatgttggccttcctgacccaacaaggtttctcccttgagaatgccttgtacgcagtctccgctgtgcgggttttcactctgggtgccgtattgttcgatcaagagtcccaagtcgctaaggaggagagggaaacacctactactgatagtatgccgccactgcttcgacaagcttgggaactcaaagatcaccaaggtgcagagccagccttcctgttcggccttgaattgatcatagccggattggagaagcagctgaaggcagaaagtgggtct

SEQ ID NO: 1963 - DNA, 621 bp, Artificial Sequence
  Nucleotides Encoding Sulfonylurea responsive repressor
atggccagactcgacaagagcaaggtgatcaacagcgcactggagctgctgaacgaggtcggaatcgaaggcctcacaacccgtaagctcgcccagaagctcggggttgagcagcctacattgtactggcacgtcaagaacaagcgagctctgctagacgccttggccattgagatgatggataggcaccaaacccactacttgcctttggaaggggaaagctggcaagacttcttgaggaacaacgctaagagctgcagacgtgctttgctcagtcaccgtgatggagccaaggtctgcctaggtacacggtggacggagcaacagtatgaatctgcggagaacatgttggccttcctgtgccaacaaggtttctcccttgagaatgccttgtacgcagtctccgctgtgcgggttttcactctgggtgccgtattgttcgatcaagagtcccaagtcgctaaggaggagagggaaacacctactactgatagtatgccgccactgcttcgacaagcttgggaactcaaagatcaccaaggtgcagagccagccttcctgttcggccttgaattgatcatagccggattggagaagcagctgaagagagaaagtgggtct

SEQ ID NO: 1964 - DNA, 621 bp, Artificial Sequence
  Nucleotides Encoding Sulfonylurea responsive repressor
atggccagactcgacaagagcaaggtgatcaacagcgcactggagctgctgaacgaggtcggaatcgaaggcctcacaacccgtaagctcgcccagaagctcggggttgagcagcctacattgtactggcacgtcaagaacaagcgagctctgctagacgccttggccattgagatgatggataggcaccaaacccactactcgcctttggaaggggaaagctggcaagacttcttgaggaacaacgctaagagctgcagaaatgctttgctcagtcaccgtgatggagccaaggtctgcctaggtacacggtggacggagcaacagtatgaatctgcggagaacatgttggccttcctgacccaacaaggtttctcccttgagaatgccttgtacgcactccaggctgtgcgggttttcactctgggttgggtattgttcgatcaagagtcccaagtcgctaaggaggagagggaaacacctactactgatagtatgccgccactgcttcgacaagcttgggaactcaaagatcaccaaggtgcagagccagccttcctgttcggccttgaattgatcatacgcggattggagaagcagctgaagtcagaaagtgggtct

SEQ ID NO: 1965 - DNA, 621 bp, Artificial Sequence
  Nucleotides Encoding Sulfonylurea responsive repressor
atggccagactcgacaagagcaaggtgatcaacagcgcactggagctgctgaacgaggtcggaatcgaaggcctcacaacccgtaagctcgcccagaagctcggggttgagcagcctacattgtactggcacgtcaagaacaagcgagctctgctagacgccttggccattgagatgatggataggcaccaaacccactactcgcctttggaaggggaaagctggcaagacttcttgaggaacaacgctaagagctgcagacgtgctttgctcagtcaccgtgatggagccaaggtctgcctaggtacacggtggacggagcaacagtatgaatctgcggagaacatgttggccttcctgacccaacaaggtttctcccttgagaatgccttgtacgcactcgaagctgtgcgggttttcactctgggtgccgtattgttcgatcaagagtcccaagtcgctaaggaggagagggaaacacctactactgatagtatgccgccactgcttcgacaagcttgggaactcaaagatcaccaaggtgcagagccagccttcctgttcggccttgaattgatcatacgcggattggagaagcagctgaagagagaaagtgggtct

SEQ ID NO: 1966 - DNA, 621 bp, Artificial Sequence
  Nucleotides Encoding Sulfonylurea responsive repressor
atggccagactcgacaagagcaaggtgatcaacagcgcactggagctgctgaacgaggtcggaatcgaaggcctcacaacccgtaagctcgcccagaagctcggggttgagcagcctacattgtactggcacgtcaagaacaagcgagctctgctagacgccttggccattgagatgatggataggcaccaaacccactactcgcctttggaaggggaaagctggcaagacttcttgaggaacaacgctaagagctgcagacgtgctttgctcagtcaccgtgatggagccaaggtctgcctaggtacacggtggacggagcaacagtatgaatctgcggagaacatgttggccttcctgacccaacaaggtttctcccttgagaatgccttgtacgcagtctccgctgtgcgggttttcactctgggtgccgtattgttcgatcaagagtcccaagtcgctaaggaggagagggaaacacctactactgatagtatgccgccactgcttcgacaagcttgggaactcaaagatcaccaaggtgcagagccagccttcctgttcggccttgaattgatcatacgcggattggagaagcagctgaagagagaatgtgggtct

SEQ ID NO: 1967 - DNA, 621 bp, Artificial Sequence
  Nucleotides Encoding Sulfonylurea responsive repressor
atggccagactcgacaagagcaaggtgatcaacagcgcactggagctgctgaacgaggtcggaatcgaaggcctcacaacccgtaagctcgcccagaagctcggggttgagcagcctacattgtactggcacgtcaagaacaagcgagctctgctagacgccttggccattgagatgatggataggcaccaaacccactactcgcctttggaaggggaaagctggcaagacttcttgaggaacaacgctaagagctgcagaaatgctttgctcagtcaccgtgatggagccaaggtctgcctaggtacacggtggacggagcaacagtatgaatctgcggagaacatgttggccttcctgacccaacaaggtttctcccttgagaatgccttgtacgcagtctccgctgtgcgggttttcactctgggtgccgtattgttcgatcaagagtcccaagtcgctaaggaggagagggaaacacctactactgatagtatgccgccactgcttcgacaagcttgggaactcaaagatcaccaaggtgcagagccagccttcctgttcggccttgaattgatcatatccggattggagaagcagctgaagtcagaaagtgggtct

SEQ ID NO: 1968 - DNA, 621 bp, Artificial Sequence
  Nucleotides Encoding Sulfonylurea responsive repressor
atggccagactcgacaagagcaaggtgatcaacagcgcactggagctgctgaacgaggtcggaatcgaaggcctcacaacccgtaagctcgcccagaagctcggggttgagcagcctacattgtactggcacgtcaagaacaagcgagctctgctagacgccttggccattgagatgatggataggcaccaaacccactacttgcctttggaaggggaaagctggcaagacttcttgaggaacaacgctaagagctgcagaaatgctttgctcagtcaccgtgatggagccaaggtctgcctaggtacacggtggacggagcaacagtatgaatctgcggagaacatgttggccttcctgacccaacaaggtttctcccttgagaatgccttgtacgcagtctccgctgtgcgggttttcactctgggtgccgtattgttcgatcaagagtcccaagtcgctaaggaggagagggaaacacctactactgatagtatgccgccactgcttcgacaagcttgggaactcaaagatcaccaaggtgcagagccagccttcctgttcggccttgaattgatcatatccggattggagaagcagctgaagagagaaagtgggtct

SEQ ID NO: 1969 - DNA, 621 bp, Artificial Sequence
  Nucleotides Encoding Sulfonylurea responsive repressor
atggccagactcgacaagagcaaggtgatcaacagcgcactggagctgctgaacgaggtcggaatcgaaggcctcacaacccgtaagctcgcccagaagctcggggttgagcagcctacattgtactggcacgtcaagaacaagcgagctctgctagacgccttggccattgagatgatggataggcaccaaacccactactcgcctttggaaggggaaagctggcaagacttcttgaggaacaacgctaagagcatgagatgtgctttgctcagtcaccgtgatggagccaaggtctgcctaggtacacggtggacggagcaacagtatgaatctgcggagaacatgttggccttcctgacccaacaaggtttctcccttgagaatgccttgtacgcagtctccgctgtgcgggttttcactctgggttgggtattgttcgatcaagagtcccaagtcgctaaggaggagagggaaacacctactactgatagtatgccgccactgcttcgacaagcttgggaactcaaagatcaccaaggtgcagagccagccttcctgttcggccttgaattgatcatagccggattggagaagcagctgaagagagaaagtgggtct

SEQ ID NO: 1970 - DNA, 621 bp, Artificial Sequence
  Nucleotides Encoding Sulfonylurea responsive repressor
atggccagactcgacaagagcaaggtgatcaacagcgcactggagctgctgaacgaggtcggaatcgaaggcctcacaacccgtaagctcgcccagaagctcggggttgagcagcctacattgtactggcacgtcaagaacaagcgagctctgctagacgccttggccattgagatgatggataggcaccaaacccactacttgcctttggaaggggaaagctggcaagacttcttgaggaacaacgctaagagctgcagacgtgctttgctcagtcaccgtgatggagccaaggtctgcctaggtacacggtggacggagcaacagtatgaatctgcggagaacatgttggccttcctgacccaacaaggtttctcccttgagaatgccttgtacgcagtctccgctgtgcgggttttcactctgggtgccgtattgttcgatcaagagtcccaagtcgctaaggaggagagggaaacacctactactgatagtatgccgccactgcttcgacaagcttgggaactcaaagatcaccaaggtgcagagccagccttcctgttcggccttgaattgatcatatccggattggagaagcagctgaagagagaaagtgggtct

SEQ ID NO: 1971 - DNA, 621 bp, Artificial Sequence
  Nucleotides Encoding Sulfonylurea responsive repressor
atggccagactcgacaagagcaaggtgatcaacagcgcactggagctgctgaacgaggtcggaatcgaaggcctcacaacccgtaagctcgcccagaagctcggggttgagcagcctacattgtactggcacgtcaagaacaagcgagctctgctagacgccttggccattgagatgatggataggcaccaaacccactacttgcctttggaaggggaaagctggcaagacttcttgaggaacaacgctaagagctgcagacgtgctttgctcagtcaccgtgatggagccaaggtctgcctaggtacacggtggacggagcaacagtatgaatctgcggagaacatgttggccttcctgacccaacaaggtttctcccttgagaatgccttgtacgcagtctccgctgtgcgggttttcactctgggttgggtattgttcgatcaagagtcccaagtcgctaaggaggagagggaaacacctactactgatagtatgccgccactgcttcgacaagcttgggaactcaaagatcaccaaggtgcagagccagccttcctgttcggccttgaattgatcatatccggattggagaagcagctgaagagagaaagtgggtct

SEQ ID NO: 1972 - DNA, 621 bp, Artificial Sequence
  Nucleotides Encoding Sulfonylurea responsive repressor
atggccagactcgacaagagcaaggtgatcaacagcgcactggagctgctgaacgaggtcggaatcgaaggcctcacaacccgtaagctcgcccagaagctcggggttgagcagcctacattgtactggcacgtcaagaacaagcgagctctgctagacgccttggccattgagatgttggataggcaccaaacccactactcgcctttggaaggggaaagctggcaagacttcttgaggaacaacgctaagagctgcagacgtgctttgctcagtcaccgtgatggagccaaggtctgcctaggtacacggtggacggagcaacagtatgaatctgcggagaacatgttggccttcctgacccaacaaggtttctcccttgagaatgccttgtacgcagtctccgctgtgcgggttttcactctgggtgccgtattgttcgatcaagagtcccaagtcgctaaggaggagagggaaacacctactactgatagtatgccgccactgcttcgacaagcttgggaactcaaagatcaccaaggtgcagagccagccttcctgttcggccttgaattgatcatagccggattggagaagcagctgaagtcagaaagtgggtct

SEQ ID NO: 1973 - DNA, 621 bp, Artificial Sequence
  Nucleotides Encoding Sulfonylurea responsive repressor
atggccagactcgacaagagcaaggtgatcaacagcgcactggagctgctgaacgaggtcggaatcgaaggcctcacaacccgtaagctcgcccagaagctcggggttgagcagcctacattgtactggcacgtcaagaacaagcgagctctgctagacgccttggccattgagatgatggataggcaccaaacccactacttgcctttggaaggggaaagctggcaagacttcttgaggaacaacgctaagagctgcagacgtgctttgctcagtcaccgtgatggagccaaggtctgcctaggtacacggtggacggagcaacagtatgaatctgcggagaacatgttggccttcctgacccaacaaggtttctcccttgagaatgccttgtacgcagtctccgctgtgcgggttttcactctgggtgccgtattgttcgatcaagagtcccaagtcgctaaggaggagagggaaacacctactactgatagtatgccgccactgcttcgacaagcttgggaactcaaagatcaccaaggtgcagagccagccttcctgttcggccttgaattgatcatacgcggattggagaagcagctgaagtcagaaagtgggtct

SEQ ID NO: 1974 - DNA, 621 bp, Artificial Sequence
  Nucleotides Encoding Sulfonylurea responsive repressor
atggccagactcgacaagagcaaggtgatcaacagcgcactggagctgctgaacgaggtcggaatcgaaggcctcacaacccgtaagctcgcccagaagctcggggttgagcagcctacattgtactggcacgtcaagaacaagcgagctctgctagacgccttggccattgagatgatggataggcaccaaacccactactcgcctttggaaggggaaagctggcaagacttcttgaggaacaacgctaagagctgcagaaatgctttgctcagtcaccgtgatggagccaaggtctgcctaggtacacggtggacggagcaacagtatgaatctgcggagaacatgttggccttcctgacccaacaaggtttctcccttgagaatgccatgtacgcactccaggctgtgcgggttttcactctgggttgggtattgttcgatcaagagtcccaagtcgctaaggaggagagggaaacacctactactgatagtatgccgccactgcttcgacaagcttgggaactcaaagatcaccaaggtgcagagccagccttcctgttcggccttgaattgatcatagccggattggagaagcagctgaagagagaaagtgggtct

SEQ ID NO: 1975 - DNA, 621 bp, Artificial Sequence
  Nucleotides Encoding Sulfonylurea responsive repressor
atggccagactcgacaagagcaaggtgatcaacagcgcactggagctgctgaacgaggtcggaatcgaaggcctcacaacccgtaagctcgcccagaagctcggggttgagcagcctacattgtactggcacgtcaagaacaagcgagctctgctagacgccttggccattgagatgatggataggcaccaaacccactactcgcctttggaaggggaaagctggcaagacttcttgaggaacaacgctaagagcttgagatgtgctttgctcagtcaccgtgatggagccaaggtctgcctaggtacacggtggacggagcaacagtatgaatctgcggagaacatgttggccttcctgacccaacaaggtttctcccttgagaatgccttgtacgcagtcgacgctgcgcgggttttcactctgggttgggtattgttcgatcaagagtcccaagtcgctaaggaggagagggaaacacctactactgatagtatgccgccactgcttcgacaagcttgggaactcaaagatcaccaaggtgcagagccagccttcctgttcggccttgaattgatcatacgcggattggagaagcagctgaagagagaaagtgggtct

SEQ ID NO: 1976 - DNA, 621 bp, Artificial Sequence
  Nucleotides Encoding Sulfonylurea responsive repressor
atggccagactcgacaagagcaaggtgatcaacagcgcactggagctgctgaacgaggtcggaatcgaaggcctcacaacccgtaagctcgcccagaagctcggggttgagcagcctacattgtactggcacgtcaagaacaagcgagctctgctagacgccttggccattgagatgatggataggcaccaaacccactactcgcctttggaaggggaaagctggcaagacttcttgaggaacaacgctaagagctgcagacgtgctttgctcagtcaccgtgatggagccaaggtctgcctaggtacacggtggacggagcaacagtatgaaactgcggagaacatgttggccttcctgacccaacaaggtttctcccttgagaatgccttgtacgcagtctccgctgtgcgggttttcactctgggtgccgtattgtttgatcaagagtcccaagtcgctaaggaggagagggaaacacctactactgatagtatgccgccactgcttcgacaagcttgggaactcaaagatcaccaaggtgcagagccagccttcctgttcggccttgaattgatcatatccggattggagaagcagctgaagtcagaaagtgggtct

SEQ ID NO: 1977 - DNA, 621 bp, Artificial Sequence
  Nucleotides Encoding Sulfonylurea responsive repressor
atggccagactcgacaagagcaaggtgatcaacagcgcactggagctgctgaacgaggtcggaatcgaaggcctcacaacccgtaagctcgcccagaagctcggggttgagcagcctacattgtactggcacgtcaagaacaagcgagctctgctagacgccttggccattgagatgatggataggcaccaaacccactacttgcctttggaaggggaaagctggcaagacttcttgaggaacaacgctaagagctgcagaaatgctttgctcagtcaccgtgatggagccaaggtctgcctaggtacacggtggacggagcaacagtatgaatctgcggagaacatgttggccttcctgacccaacaaggtttctcccttgagaatgccttgtacgcactcgacgctgtgcgggttttcactctgggtgccgtattgttcgatcaagagtcccaagtcgctaaggaggagagggaaacacctactactgatagtatgccgccactgcttcgacaagcttgggaactcaaagatcaccaaggtgcagagccagccttcctgttcggccttgaattgatcatacgcggattggagaagcagctgaagtcagaaagtgggtct

SEQ ID NO: 1978 - DNA, 621 bp, Artificial Sequence
  Nucleotides Encoding Sulfonylurea responsive repressor
atggccagactcgacaagagcaaggtgatcaacagcgcactggagctgctgaacgaggtcggaatcgaaggcctcacaacccgtaagctcgcccagaagctcggggttgagcagcctacattgtactggcacgtcaagaacaagcgagctctgctagacgccttggccattgagatgttggataggcaccaaacccactactcgcctttggaaggggaaagctggcaagacttcttgaggaacaacgctaagagctgcagacgtgctttgctcagtcaccgtgatggagccaaggtctgcctaggtacacggtggacggagcaacagtatgaatctgcggagaacatgttggccttcctgtgccaacaaggtttctcccttgagaatgccttgtacgcagtctccgctgtgcgggttttcactctgggtgccgtattgttcgatcaagagtcccaagtcgctaaggaggagagggaaacacctactactgatagtatgccgccactgcttcgacaagcttgggaactcaaagatcaccaaggtgcagagccagccttcctgttcggccttgaattgatcatacgcggattggagaagcagctgaaggcagaaagtgggtct

SEQ ID NO: 1979 - DNA, 621 bp, Artificial Sequence
  Nucleotides Encoding Sulfonylurea responsive repressor
atggccagactcgacaagagcaaggtgatcaacagcgcactggagctgctgaacgaggtcggaatcgaaggcctcacaacccgtaagctcgcccagaagctcggggttgagcagcctacattgtactggcacgtcaagaacaagcgagctctgctagacgccttggccattgagatgatggataggcaccaaacccactactcgcctttggaaggggaaagctggcaagacttcttgaggaacaacgctaagagcttcagatgtgctttgctcagtcaccgtgatggagccaaggtctgcctaggtacacggtggacggagcaacagtatgaatctgcggagaacatgttggccttcctgacccaacaaggtttctcccttgagaatgccttgtacgcactcaaggctgtgcggattttcactctgggtgccgtattgttcgatcaagagtcccaagtcgctaaggaggagagggaaacacctactactgatagtatgccgccactgcttcgacaagcttgggaactcaaagatcaccaaggtgcagagccagccttcctgttcggccttgaattgatcatagccggattggagaagcagctgaaggcagaaagtgggtct

SEQ ID NO: 1980 - DNA, 621 bp, Artificial Sequence
  Nucleotides Encoding Sulfonylurea responsive repressor
atggccagactcgacaagagcaaggtgatcaacagcgcactggagctgctgaacgaggtcggaatcgaaggcctcacaacccgtaagctcgcccagaagctcggggttgagcagcctacattgtactggcacgtcaagaacaagcgagctctgctagacgccttggccattgagatgatggataggcaccaaacccactactgccctttggaaggggaaagctggcaagacttcttgaggaacaacgctaagagcttgagatgtgctttgctcagtcaccgtgatggagccaaggtctgcctaggtacacggtggacggagcaacagtatgaatctgcggagaacatgttggccttcctgacccaacaaggtttctcccttgagaatgccttgtacgcactccaggctgtgcggattttcactctgggttgcgtattgtttgatcaagagtcccaagtcgctaaggaggagagggaaacacctactactgatagtatgccgccactgcttcgacaagcttgggaactcaaagatcaccaaggtgcagagccagccttcctgttcggccttgaattgatcatacgcggattggagaagcagctgaagagagaaagtgggtct

SEQ ID NO: 1981 - DNA, 621 bp, Artificial Sequence
  Nucleotides Encoding Sulfonylurea responsive repressor
atggccagactcgacaagagcaaggtgatcaacagcgcactggagctgctgaacgaggtcggaatcgaaggcctcacaacccgtaagctcgcccagaagctcggggttgagcagcctacattgtactggcacgtcaagaacaagcgagctctgctagacgccttggccattgagatgatggataggcaccaaacccactacttgcctttggaaggggaaagctggcaagacttcttgaggaacaacgctaagagcttgagatgtgctttgctcagtcaccgtgatggagccaaggtctgcctaggtacacggtggacggagcaacagtatgaatctgcggagaacatgttggccttcctgacccaacaaggtttctcccttgagaatgccttgtacgcactctcggctgtgcgggttttcactctgggttgggtattgttcgatcaagagtcccaagtcgctaaggaggagagggaaacacctactactgatagtatgccgccactgcttcgacaagcttgggaactcaaagatcaccaaggtgcagagccagccttcctgttcggccttgaattgatcatagccggattggagaagcagctgaagagagaaagtgggtct

SEQ ID NO: 1982 - DNA, 621 bp, Artificial Sequence
  Nucleotides Encoding Sulfonylurea responsive repressor
atggccagactcgacaagagcaaggtgatcaacagcgcactggagctgctgaacgaggtcggaatcgaaggcctcacaacccgtaagctcgcccagaagctcggggttgagcagcctacattgtactggcacgtcaagaacaagcgagctctgctagacgccttggccattgagatgatggataggcaccaaacccactacttgcctttggaaggggaaagctggcaagacttcttgaggaacaacgctaagagctgcagacgtgctttgctcagtcaccgtgatggagccaaggtctgcctaggtacacggtggacggagcaacagtatgaaactgcggagaacatgttggccttcctgacccaacaaggtttctcccttgagaatgccttgtacgcagtctccgctgtgcgggttttcactctgggtgccgtattgttcgatcaagagtcccaagtcgctaaggaggagagggaaacacctactactgatagtatgccgccactgcttcgacaagcttgggaactcaaagatcaccaaggtgcagagccagccttcctgttcggccttgaattgatcatagccggattggagaagcagctgaagagagaaagtgggtct

SEQ ID NO: 1983 - DNA, 621 bp, Artificial Sequence
  Nucleotides Encoding Sulfonylurea responsive repressor
atggccagactcgacaagagcaaggtgatcaacagcgcactggagctgctgaacgaggtcggaatcgaaggcctcacaacccgtaagctcgcccagaagctcggggttgagcagcctacattgtactggcacgtcaagaacaagcgagctctgctagacgccttggccattgagatgatggataggcaccaaacccactactcgcctttggaaggggaaagctggcaagacttcttgaggaacaacgctaagagctgcagacgtgctttgctcagtcaccgtgatggagccaaggtctgcctaggtacacggtggacggagcaacagtatgaatctgcggagaacatgttggccttcctgtgccaacaaggtttctcccttgagaatgccttgtacgcagtctccgctgtgcggattttcactctgggtgccgtattgttcgatcaagagtcccaagtcgctaaggaggagagggaaacacctactactgatagtatgccgccactgcttcgacaagcttgggaactcaaagatcaccaaggtgcagagccagccttcctgttcggccttgaattgatcatagccggattggagaagcagctgaagagagaaagtgggtct

SEQ ID NO: 1984 - DNA, 621 bp, Artificial Sequence
  Nucleotides Encoding Sulfonylurea responsive repressor
atggccagactcgacaagagcaaggtgatcaacagcgcactggagctgctgaacgaggtcggaatcgaaggcctcacaacccgtaagctcgcccagaagctcggggttgagcagcctacattgtactggcacgtcaagaacaagcgagctctgctagacgccttggccattgagatgatggataggcaccaaacccactactgccctttggaaggggaaagctggcaagacttcttgaggaacaacgctaagagctgcagaaatgctttgctcagtcaccgtgatggagccaaggtctgcctaggtacacggtggacggagcaacagtatgaatctgcggagaacatgttggccttcctgacccaacaaggtttctcccttgagaatgccatgtacgcactcaaggctgtgcggattttcactctgggttgcgtattgtgggatcaagagtcccaagtcgctaaggaggagagggaaacacctactactgatagtatgccgccactgcttcgacaagcttgggaactcaaagatcaccaaggtgcagagccagccttcctgttcggccttgaattgatcatacgcggattggagaagcagctgaagagagaaagtgggtct

SEQ ID NO: 1985 - DNA, 621 bp, Artificial Sequence
  Nucleotides Encoding Sulfonylurea responsive repressor
atggccagactcgacaagagcaaggtgatcaacagcgcactggagctgctgaacgaggtcggaatcgaaggcctcacaacccgtaagctcgcccagaagctcggggttgagcagcctacattgtactggcacgtcaagaacaagcgagctctgctagacgccttggccattgagatgatggataggcaccaaacccactactcgcctttggaaggggaaagctggcaagacttcttgaggaacaacgctaagagctgcagaaatgctttgctcagtcaccgtgatggagccaaggtcgtgctaggtacacggtggacggagcaacagtatgaatctgcggagaacatgttggccttcctgacccaacaaggtttctcccttgagaatgccatgtacgcactcgaagctgcgcggattttcactctgggttgggtattgttcgatcaagagtcccaagtcgctaaggaggagagggaaacacctactactgatagtatgccgccactgcttcgacaagcttgggaactcaaagatcaccaaggtgcagagccagccttcctgttcggccttgaattgatcatacgcggattggagaagcagctgaagtcagaaagtgggtct

SEQ ID NO: 1986 - DNA, 621 bp, Artificial Sequence
  Nucleotides Encoding Sulfonylurea responsive repressor
atggccagactcgacaagagcaaggtgatcaacagcgcactggagctgctgaacgaggtcggaatcgaaggcctcacaacccgtaagctcgcccagaagctcggggttgagcagcctacattgtactggcacgtcaagaacaagcgagctctgctagacgccttggccattgagatgatggataggcaccaaacccactactcgcctttggaaggggaaagctggcaagacttcttgaggaacaacgctaagagcttgagatgtgctttgctcagtcaccgtgatggagccaaggtctgcctaggtacacggtggacggagcaacagtatgaatctgcggagaacatgttggccttcctgacccaacaaggtttctcccttgagaatgccttgtacgcactcacggctgtgcgggttttcactctgggttgggtattgttcgatcaagagtcccaagtcgctaaggaggagagggaaacacctactactgatagtatgccgccactgcttcgacaagcttgggaactcaaagatcaccaaggtgcagagccagccttcctgttcggccttgaattgatcatagccggattggagaagcagctgaagagagaaagtgggtct

SEQ ID NO: 1987 - DNA, 639 bp, Artificial Sequence
  Nucleotides Encoding Sulfonylurea responsive repressor
atggccagactcgacaagagcaaggtgatcaacagcgcactggagctgctgaacgaggtcggaatcgaaggcctcacaacccgtaagctcgcccagaagctcggggttgagcagcctacattgtactggcacgtcaagaacaagcgagctctgctagacgccttggccattgagatgatggataggcaccagacccactacttgcctttggaaggggaaagctggcaagacttcttgaggaacttcgctaagagcatgcgacgtgctttgctcagtcaccgtgatggagccaaggtctcgcttggtacacggtggacggagcaacagtatgaaactgcagagaacatgttggccttcctgacccaacaaggtttcccccttgagaatgccttgtacgcaaccgacgctgtgcgtgttttcactctgggtgccgtattgcaagatcaagagggccaagtcgctaaggaggagagggaaacacctactactgatagtatgccgccactgcttcgacaagcctgggaactcaaagatcaccaaggtgcagagccagccttcctgttcggccttgaattgatcatagccggattggagaagcagctgaagagagaaagtgggtctcaccatcaccaccatcac

SEQ ID NO: 1988 - DNA, 639 bp, Artificial Sequence
  Nucleotides Encoding Sulfonylurea responsive repressor
atggccagactcgacaagagcaaggtgatcaacagcgcactggagctgctgaacgaggtcggaatcgaaggcctcacaacccgtaagctcgcccagaagctcggggttgagcagcctacattgtactggcacgtcaagaacaagcgagctctgctagacgccttggccattgagatgcatgataggcaccagacccactacttgcctttggaaggggaaagctggcaagacttcttgaggaacttcgctaagagcatgcgacgtgctttgctcagtcaccgtgatggagccaaggtctcgcttggtacacggtggacggagcaacagtatgaaactgcagagaacatgttggccttcctgacccaacaaggtttctcccttgagaatgccttgtacgcaacctcagctgtgcgtgttttcactctgggtgccgtattgcaagatcaagagcagcaagtcgctaaggaggagagggaaacacctactcctgatagtatgccgccactgcttcgacaagcctgggaactcaaagatcaccaaggtgcagagccagccttcctgttcggccttgaattgatcatagccggattggagaagcagctgaagagagaaagtgggtctcaccatcaccaccatcac

SEQ ID NO: 1989 - DNA, 639 bp, Artificial Sequence
  Nucleotides Encoding Sulfonylurea responsive repressor
atggccagactcgacaagagcaaggtgatcaacagcgcactggagctgctgaacgaggtcggaatcgaaggcctcacaacccgtaagctcgcccagaagctcggggttgagcagcctacattgtactggcacgtcaagaacaagcgagctctgctagacgccttggccattgagatgatggataggcaccagacccactacttgcctttggaaggggaaagctggcaagacttcttgaggaactacgctaagagcatgcgacgtgctttgctcagtcaccgtgatggagccaaggtcgcgcttggtacacggtggacggagcaacagtatgaaactgcagagaacatgttggccttcctgacccaacaaggtttctcacttgagaatgccttgtacgcaacctcagctgtgcgtgttttcactctgggtgccgtattgcaagatcaagagggccaagtcgctaaggaggagagggaaacacctactactgatagtatgccgccactgcttcgacaagcctgggaactcaaagatcaccaaggtgcagagccagccttcctgttcggccttgaattgatcatagccggattggagaagcagctgaagagagaaagtgggtctcaccatcaccaccatcac

SEQ ID NO: 1990 - DNA, 639 bp, Artificial Sequence
  Nucleotides Encoding Sulfonylurea responsive repressor
atggccagactcgacaagagcaaggtgatcaacagcgcactggagctgctgaacgaggtcggaatcgaaggcctcacaacccgtaagctcgcccagaagctcggggttgagcagcctacattgtactggcacgtcaagaacaagcgagctctgctagacgccttggccattgagatgatggataggcaccagacccactacttgcctttggaaggggaaagctggcaagacttcttgaggaacttcgctaagagcatgcgacgtgctttgctcagtcaccgtgatggagccaaggtcgcgcttggtacacggtggacggagcaacagtatgaaactgcagagaacatgttggccttcctgacccaacaaggtttctcccttgagaatgccttgtacgcaacctcagctgtgcgtgttttcactctgggtgccgtattgttggatcaagagcagcaagtcgctaaggaggagagggaaacacctactactgatagtatgccgccactgcttcgacaagcctgggaactcaaagatcaccaaggtgcagagccagccttcctgttcggccttgaattgatcatagccggattggagaagcagctgaagagagaaagtgggtctcaccatcaccaccatcac

SEQ ID NO: 1991 - DNA, 639 bp, Artificial Sequence
  Nucleotides Encoding Sulfonylurea responsive repressor
atggccagactcgacaagagcaaggtgatcaacagcgcactggagctgctgaacgaggtcggaatcgaaggcctcacaacccgtaagctcgcccagaagctcggggttgagcagcctacattgtactggcacgtcaagaacaagcgagctctgctagacgccttggccattgagatgatggataggcacggcacccactacttgcctttggaaggggaaagctggcaagacttcttgaggaactacgctaagagcatgcgacgtgctttgctcagtcaccgtgatggagccaaggtcgcgcttggtacacggtggacggagcaacagtatgaaactgcagagaacatgttggccttcctgacccaacaaggtttctcccttgagaatgccttgtacgcaaccggcgctgtgcgtattttcactctgggtgccgtattgcaagatcaagagagccaagtcgctaaggaggagagggaaacacctactactgatagtatgccgccactgcttcgacaagcctgggaactcaaagatcaccaaggtgcagagccagccttcctgttcggccttgaagtgatcatagccggattggagaagcagctgaagagagaaagtgggtctcaccatcaccaccatcac

SEQ ID NO: 1992 - DNA, 603 bp, Artificial Sequence
  Nucleotides Encoding Sulfonylurea responsive repressor
atggccagactcgacaagagcaaggtgatcaacagcgcactggagctgctgaacgaggtcggaatcgaaggcctcacaacccgtaagctcgcccagaagctcggggttgagcagcctacattgtactggcacgtcaagaacaagcgagctctgctagacgccttggccattgagatgcatgataggcacggcacccactacttgcctttggaaggggaaagctggcaagacttcttgaggaacttcgctaagagcatgcgacgtgctttgctcagtcaccgtgatggagccaaggtctcgcttggtacacggtggacggagcaacagtatgaaactgcagagaacatgttggccttcctgacccaacaaggtttctcccttgagaatgccttgtacgcaacctcagctgtgcgtgttttcactctgggtgccgtattgctagatcaagagcagcaagtcgctaaggaggagagggaaacacctactactgatagtatgccgccactgcttcgacaagcctgggaactcaaagatcaccaaggtgcagagccagccttcctgttcggccttgaattgatcatagccggattggagaagcagctg

SEQ ID NO: 1993 - DNA, 639 bp, Artificial Sequence
  Nucleotides Encoding Sulfonylurea responsive repressor
atggccagactcgacaagagcaaggtgatcaacagcgcactggagctgctgaacgaggtcggaatcgaaggcctcacaacccgtaagctcgcccagaagctcggggttgagcagcctacattgtactggcacgtcaagaacaagcgagctctgctagacgccttggccattgagatgatggataggcacggcacccactacttgcctttggaaggggaaagctggcaagacttcttgaggaacttcgctaagagcatgcgacgtgctttgctcagtcaccgtgatggagccaaggtctcgcttggtacacggtggacggagcaacagtatgaaactgcagagaacatgttggccttcctgacccaacaaggtttctcccttgagaatgccttgtacgcaacctcagctgtgcgtgttttcactctgggtgccgtattgcaagatcaagagagccaagtcgctaaggaggagagggaaacacctactactgatagtatgccgccactgcttcgacaagcctgggaactcaaagatcaccaaggtgcagagccagccttcctgttcggccttgaattgatcatagccggattggagaagcagctgaagagagaaagtgggtctcaccatcaccaccatcac

SEQ ID NO: 1994 - DNA, 639 bp, Artificial Sequence
  Nucleotides Encoding Sulfonylurea responsive repressor
atggccagactcgacaagagcaaggtgatcaacagcgcactggagctgctgaacgaggtcggaatcgaaggcctcacaacccgtaagctcgcccagaagctcggggttgagcagcctacattgtactggcacgtcaagaacaagcgagctctgctagacgccttggccattgagatgcatgataggcaccagacccactacttgcctttggaaggggaaagctggcaagacttcttgaggaacttcgctaagagcatgcgacgtgctttgctcagtcaccgtgatggagccaaggtctcgcttggtacacggtggacggagcaacagtatgaaactggagagaacatgttggccttcctgacccaacaaggtttctcccttgagaatgccttgtacgcagtggacgctgtgcgtgttttcactctgggtgccgtattgcaagatcaagagggccaagtcgctaaggaggatagggaaacacctactactgatagtatgccgccactgcttcgacaagcctgggaactcaaagatcaccaaggtgcagagccagccttcctgttcggccttgaattgatcatagccggattggagaagcagctgaagagagaaagtgggtctcaccatcaccaccatcac

SEQ ID NO: 1995 - DNA, 639 bp, Artificial Sequence
  Nucleotides Encoding Sulfonylurea responsive repressor
atggccagactcgacaagagcaaggtgatcaacagcgcactggagctgctgaacgaggtcggaatcgaaggcctcacaacccgtaagctcgcccagaagctcggggttgagcagcctacattgtactggcacgtcaagaacaagcgagctctgctagacgccttggccattgagatgatggataggcaccagacccactacttgcctttggaaggggaaagctggcaagacttcttgaggaactacgctaagagcatgcgacgtgctttgctcagtcaccgtgatggagccaaggtctcgcttggtacacggtggacggagcaacagtatgaaactgcagagaacatgttggccttcctgacccaacaaggtttctcccttgagaatgccttgtacgcaacctcagctgtgcgtgttttcactctgggtgccgtattgcaagatcaagagggccaagtcgctaatgaggagagggaaacacctactactgatagtatgccgccactgcttcgacaagcctgggaactcaaagatcaccaaggtgcagagccagccttcctgttcggccttgaattgatcatagccggattggagaagcagctgaagagagaaagtgggtctcaccatcaccaccatcac

SEQ ID NO: 1996 - DNA, 639 bp, Artificial Sequence
  Nucleotides Encoding Sulfonylurea responsive repressor
atggccagactcgacaagagcaaggtgatcaacagcgcactggagctgctgaacgaggtcggaatcgaaggcctcacaacccgtaagctcgcccagaagctcggggttgagcagcctacattgtactggcacgtcaagaacaagcgagctctgctagacgccttggccattgagatgatggataggcaccagacccactacttgcctttggaaggggaaagctggcaagacttcttgaggaacttcgctaagagcatgcgacgtgctttgctcagtcaccgtgatggagccaaggtctcgcttggtacacggtggacggagcaacagtatgaaactgcagagaacatgttggccttcctgacccaacaaggtttctcccttgagaatgccttgtacgcaacctcagctgtgcgtgttttcactctgggtgccgtattgcaagatcaagagagccaagtcgctaaggaggagagggaaacacctactactgatagtatgccgccactgcttcgacaagcctgggaactcaaagatcaccaaggtgcagagccagccttcctgttcggccttgaattgatcatagctggattggagaagcagctgaacagagaaagtgggtctcaccatcaccaccatcac

SEQ ID NO: 1997 - DNA, 639 bp, Artificial Sequence; identical to SEQ ID NO: 1987
  Nucleotides Encoding Sulfonylurea responsive repressor

SEQ ID NO: 1998 - DNA, 639 bp, Artificial Sequence
  Nucleotides Encoding Sulfonylurea responsive repressor
atggccagactcgacaagagcaaggtgatcaacagcgcactggagctgctgaacgaggtcggaatcgaaggcctcacaacccgtaagctcgcccagaagctcggggttgagcagcctacattgtactggcacgtcaagaacaagcgagctctgctagacgccttggccattgagatgcatgataggcaccagacccactacttgcctttggaaggggaaagctggcaagacttcttgaggaacttcgctaagagcatgcgacgtgctttgctcagtcaccgtgatggagccaaggtctcgcttggtacacggtggacggagcaacagtatgaaactgcagagaacatgttggccttcctgacccaacaaggtttctcccttgagaatgccttgtacgcaacctcagctgtgcgtgttttcactctgggtgccgtattgcaagatcaagagagccaagtcgctaaggaggagagggaaacacctactactgatagtatgccgccactgcttcgacaagcctgggaactcaaagatcaccaaggtgcagagccagccttcctgttcggccttgaattgatcatagccggattggagaagcagctgaagagagaaagtgggtctcaccatcaccaccatcac

SEQ ID NO: 1999 - DNA, 639 bp, Artificial Sequence
  Nucleotides Encoding Sulfonylurea responsive repressor
atggccagactcgacaagagcaaggtgatcaacagcgcactggagctgctgaacgaggtcggaatcgaaggcctcacaacccgtaagctcgcccagaagctcggggttgagcagcctacattgtactggcacgtcaagaacaagcgagctctgctagacgccttggccattgagatgaatgataggcaccagacccactacttgcctttggaaggggaaagctggcaagacttcttgaggaacttcgctaagagcatgcgacgtgctttgctcagtcaccgtgatggagccaaggtctcgcttggtacacggtggacggagcaacagtatgaaactgcagagaacatgttggccttcctgacccaacaaggtttctcccttgagaatgccttgtacgcaacctcagctgtgcgtgttttcactctgggtgccgtattgcaagatcaagagagccaagtcgctaaggaggagagggaaacacctactactgatagtatgccgccactgcttcgacaagcctgggaactcaaagatcaccaaggtgcagagccagccttcctgttcggccttgaattgatcatagccggattggagaagcagctgaagagagaaagtgggtctcaccatcaccaccatcac

SEQ ID NO: 2000 - DNA, 639 bp, Artificial Sequence
  Nucleotides Encoding Sulfonylurea responsive repressor
atggccagactcgacaagagcaaggtgatcaacagcgcactggagctgctgaacgaggtcggaatcgaaggcctcacaacccgtaagctcgcccagaagctcggggttgagcagcctacattgtactggcacgtcaagaacaagcgagctctgctagacgccttggccattgagatgatggataggcacagcacccactacttgcctttggaaggggaaagctggcaagacttcttgaggaacttcgctaagagcatgcgacgtgctttgctcagtcaccgtgatggagccaaggtcgcgcttggtacacggtggacggagcaacagtatgaaactggagagaacatgttggccttcctgacccaacaaggtttctcccttgagaatgccttgtacgcaacctcagctgtgcgtgttttcactctgggtgccgtattgcaagatcaagagagccaagtcgctaaggaggagagggaaacacctactactgatagtatgccgccactgcttcgacaagcctgggaactcaaagatcaccaaggtgcagagccagccttcctgttcggccttgaattgatcatagccggattggagaagcagctgaagagagaaagtgggtctcaccatcaccaccatcac

SEQ ID NO: 2001 - DNA, 639 bp, Artificial Sequence
  Nucleotides Encoding Sulfonylurea responsive repressor
atggccagactcgacaagagcaaggtgatcaacagcgcactggagctgctgaacgaggtcggaatcgaaggcctcacaacccgtaagctcgcccagaagctcggggttgagcagcctacattgtactggcacgtcaagaacaagcgagctctgctagacgccttggccattgagatgatggataggcaccagacccactacttgcctttggaaggggaaagctggcaagacttcttgaggaactacgctaagagcatgcgacgtgctttgctcagtcaccgtgatggagccaaggtcgcgcttggtacacggtggacggagcaacagtatgaaactgcagagaacatgttggccttcctgacccaacaaggtttctcccttgagaatgccttgtacgcaacctcagctgtgcgtgttttcactctgggtgccgtattgcaagatcaagagggccaagtcgctaaggaggagagggaaacacctactactgatagtatgccgccactgcttcgacaagcctgggaactcaaagatcaccaaggtgccgagccagccttcctgttcggccttgaattgatcatagccggattggagaagcagctgaagagagaaagtgggtctcaccatcaccaccatcac

SEQ ID NO: 2002 - DNA, 639 bp, Artificial Sequence
  Nucleotides Encoding Sulfonylurea responsive repressor
atggccagactcgacaagagcaaggtgatcaacagcgcactggagctgctgaacgaggtcggaatcgaaggcctcacaacccgtaagctcgcccagaagctcggggttgagcagcctacattgtactggcacgtcaagaacaagcgagctctgctagacgccttggccattgagatgatggataggcaccagacccactacttgcctttggaaggggaaagctggcaagacttcttgaggaacttcgctaagagcatgcgacgtgctttgctcagtcaccgtgatggagccaaggtcgcgcttggtacacggtggacggagcaacagtatgaaactgcagagaacatgttggccttcctgacccaacaaggtttctcccttgagaatgccttgtacgcaacctcagctgtgcgtgttttcactctgggtgccgtattgcaagatcaagagggccaagtcgctaaggaggagagggaaacacctactactgatagtatgccgccactgcttcgtcaagcctgggaactcaaagatcaccaaggtgcagagccagccttcctgttcggccttgaattgatcatagccggattggagaagcagctgaagagagaaagtgggtctcaccatcaccaccatcac

SEQ ID NO: 2003 - DNA, 639 bp, Artificial Sequence
  Nucleotides Encoding Sulfonylurea responsive repressor
atggccagactcgacaagagcaaggtgatcaacagcgcactggagctgctgaacgaggtcggaatcgaaggcctcacaacccgtaagctcgcccagaagctcggggttgagcagcctacattgtactggcacgtcaagaacaagcgagctctgctagacgccttggccattgagatgcatgataggcaccagacccactacttgcctttggaaggggaaagctggcaagacttcttgaggaacttcgctaagagcatgcgacgtgctttgctcagtcaccgtgatggagccaaggtcgcgcttggtacacggtggacggagcaacagtatgaaactggagagaacatgttggccttcctgacccaacaaggtttctcccttgagaatgccttgtacgcaacctcagctgtgcgtgttttcactctgggtgccgtattgcaagatcaagagggccaagtcgctaaggaggagagggaaacaccaactactgatagtatgccgccactgcttcgacaagcctgggaactcaaagatcaccaaggtgcagagccagccttcctgttcggccttgaattgatcatagccggattggagaagcagctgaagagagaaagtgggtctcaccatcaccaccatcac

SEQ ID NO: 2004 - DNA, 639 bp, Artificial Sequence
  Nucleotides Encoding Sulfonylurea responsive repressor
atggccagactcgacaagagcaaggtgatcaacagcgcactggagctgctgaacgaggtcggaatcgaaggcctcacaacccgtaagctcgcccagaagctcggggttgagcagcctacattgtactggcacgtcaagaacaagcgagctctgctagacgccttggccattgagatgcatgataggcacagaacccactacttgcctttggaaggggaaagctggcaagacttcttgaggaactacgctaagagcatgcgacgtgctttgctcagtcaccgtgatggagccaaggtctcgcttggtacacggtggacggagcaacagtatgaaactgcagagaacatgttggccttcctgacccaacaaggtttctcccttgagaatgccttgtacgcaacctcagctgtgcgtgttttcactctgggtgccgtattggtggatcaagagcagcaagtcgctaaggaggagacggaaacacctactactgatagtatgccgccactgcttcgacaagcctgggaactcaaagatcaccaaggtgcagagccagccttcctgttcggtcttgaattgatcatagccggattggagaagcagctgaagagagaaagtgggtctcaccatcaccaccatcac

SEQ ID NO: 2005 - DNA, 639 bp, Artificial Sequence
  Nucleotides Encoding Sulfonylurea responsive repressor
atggccagactcgacaagagcaaggtgatcaacagcgcactggagctgctgaacgaggtcggaatcgaaggcctcacaacccgtaagctcgcccagaagctcggggttgagcagcctacattgtactggcacgtcaagaacaagcgagctctgctagacgccttggccattgagatgatggataggcaccagacccactacttgcctttggaaggggaaagctggcaagacttcttgaggaacttcgctaagagcatgcgacgtgctttgctcagtcaccgtgatggagccaaggtctcgcttggtacacggtggacggagcaacagtatgaaactgcagagaacatgttggccttcctgatccaacaaggtttctcccttcagaatgccttgtacgcactgtcagctgtgcgtgttttcactctgggtgccgtattgcaagatcaagagagccaagtcgctaaggaggagagggaaacacctactactgatagtatgccgccactgcttcgacaagcctgggaactcaaagatcaccaaggtgcagagccagccttcctgttcggccttgaattgatcatagccggattggagaagcagctgaagagagaaagtgggtctcaccatcaccaccatcac

SEQ ID NO: 2006 - DNA, 639 bp, Artificial Sequence
  Nucleotides Encoding Sulfonylurea responsive repressor
atggccagactcgacaagagcaaggtgatcaacagcgcactggagctgctgaacgaggtcggaatcgaaggcctcacaacccgtaagctcgcccagaagctcggggttgagcagcctacattgtactggcacgtcaagaacaagcgagctctgctagacgccttggccattgagatgatggataggcaccagacccactacttgcctttggaaggggaaagctggcaagacttcttgaggaactacgctaagagcatgcgacgtgctttgctcagtcaccgtgatggagccaaggtcgcgcttggtacacggtggacggagcaacagtatgaaactgcagagaacatgttggccttcctgacccaacaaggtttctcccttgagaatgccttgtacgcaaccggcgctgtgcgtgttttcactctgggtgccgtattgcaagatcaagagagccatgtcgctaaggtggagagggaaacacctactactgatagtatgccgccactgcttcgacaagcctgggaactcaaagatcaccaaggtgcagagccagccttcctgttcggccttgaattgatcatagccggattggagaagcagctgaagagagaaagtgggtctcaccatcaccaccatcac

SEQ ID NO: 2007 - DNA, 603 bp, Artificial Sequence
  Nucleotides Encoding Sulfonylurea responsive repressor
atggccagactcgacaagagcaaggtgatcaacagcgcactggagctgctgaacgaggtcggaatcgaaggcctcacaacccgtaagctcgcccagaagctcggggttgagcagcctacattgtactggcacgtcaagaacaagcgagctctgctagacgccttggccattgagatgcatgataggcacggcacccactacttgcctttggaaggggaaagctggcaagacttcttgaggaacttcgctaagagcatgcgacgtgctttgctcagtcaccgtgatggagccaaggtctcgcttggtacacggtggacggagcaacagtatgaaactgcagagaacatgttggccttcctgacccaacaaggtttctcccttgagaatgccttgtacgcaacctcagctgtgcgtgttttcactctgggtgccgtattgctagatcaagagcagcaagtcgctaaggaggagagggaaacacctactactgatagtatgccgccactgcttcgacaagcctgggaactcaaagttcaccaaggtgcagagccagccttcctgttcggccttgaattgatcatagccggattggagaagcagctg

SEQ ID NO: 2008 - DNA, 603 bp, Artificial Sequence
  Nucleotides Encoding Sulfonylurea responsive repressor
atggccagactcgacaagagcaaggtgatcaacagcgcactggagctgctgaacgaggtcggaatcgaaggcctcacaacccgtaagctcgcccagaagctcggggttgagcagcctacattgtactggcacgtcaagaacaagcgagctctgctagacgccttggccattgagatgcatgataggcacggcacccactacttgcctttggaaggggaaagctggcaagacttcttgaggaacttcgctaagagcatgcgatgtgctttgctcagtcaccgtgatggagccaaggtctcgcttggtacacggtggacggagcaacagtatgaaactgcagagaacatgttggccttcctgacccaacaaggtttctcacttgagaatgccttgtacgcaacctcagctgtgcgtgttttcactctgggtgccgtattgctagatcaagagcagcaagtcgctaaggaggagagggaaacacctactactgatagaatgccgccactgcttcgacaagcctgggaactcaaagatcaccaaggtgcagagccagccttcctgttcggccttgaattgatcatagccggattggagaagcagctg

SEQ ID NO: 2009 - DNA, 603 bp, Artificial Sequence
  Nucleotides Encoding Sulfonylurea responsive repressor
atggccagactcgacaagagcaaggtgatcaacagcgcactggagctgctgaacgaggtcggaatcgaaggcctcacaacccgtaagctcgcccagaagctcggggttgagcagcctacattgtactggcacgtcaagaacaagcgagctctgctagacgccttggccattgagatgcacgataggcacggcacccactacttgcctttggaaggggaaagctggcaagactacttgaggaacttcgctaagagcatgcgacgtgctttgctcagtcaccgtgatggagccaaggtctcgcttggtacacggtggacggagcaacagtatgaaactgcggagaacatgttggccttcctgacccaacaaggtttctcccttgagaatgccttgtacgcaacctcagctgtgcgtgttttcactctgggtgccgtattgctagatcaagagcagcaagtcgctaaggaggagagggaaacacctactactgatagtatgccgccactgcttcgacaagcctgggaactcaaagaacaccaaggtgcagagccagccttcctgttcggccttgaattgatcatagccggattggagaagcagctg

SEQ ID NO: 2010 - DNA, 603 bp, Artificial Sequence
  Nucleotides Encoding Sulfonylurea responsive repressor
atggccagactcgacaagagcaaggtgatcaacagcgcactggagctgctgaacgaggtcggaatcgaaggcctcacaacccgtaagctcgcccagaagctcggggttgagcagcctacattgtactggcacgtcaagaacaagcgagctctgctagacgccttggccattgagatgcatgataggcacggcacccactacttgcctttggaaggggaaagctggcaagacttcttgaggaacttcgctaagagcatgcgacgtgctttgctcagtcaccgtgatggagccaaggtctcgcttggtacacggtggacggagcaacagtatgaaactgcagagaacatgttggccttcctgacccaacaaggtttctcccttgagaatgccttgtacgcaacctcagctgtgcgtgttttcactctgggtgccgtattgctagatcaagagcagcaagtcgctaaggaggagagggaaacacctactactgatagtatgccgccactgcttcgacaagcctgggaactcaaagaacaccaaggtgcagagccggccttcctgttcggccttgaattgatcatagccggattggagaagcagctg

SEQ ID NO: 2011 - DNA, 639 bp, Artificial Sequence
  Nucleotides Encoding Sulfonylurea responsive repressor
atggccagactcgacaagagcaaggtgatcaacagcgcactggagctgctgaacgaggtcggaatcgaaggcctcacaacccgtaagctcgcccagaagctcggggttgagcagcctacattgtactggcacgtcaagaacaagcgagctctgctagacgccttggccattgagatgcatgataggcaccaaacccactacttgcctttggaaggggaaagctggcaagactatttgaggaactttgctaagagcatgcgacgagctttgctcagtcaccgtgatggagccaaggtcgcccttggtacacggtggacggagcaacagtatgaaactgcggagaacatgttggccttcctgacccaacaaggtttctcccttgagaatgccttgtacgcaacagatgctgtgcgggttttcactctgggtgccgtattgctggatcaagagggacaagtcgctaaggaggagagggaaacacctactactgatagtatgccgccactgcttcgacaagcctgggaactcaaagtgcaccaaggtgcagagccagccttcctgttcggccttgaattgatcatagccggattggagaagcagctgaagagagaaagtgggtctcaccatcaccaccatcac

SEQ ID NO: 2012 - DNA, 639 bp, Artificial Sequence
  Nucleotides Encoding Sulfonylurea responsive repressor
atggccagactcgacaagagcaaggtgatcaacagcgcactggagctgctgaacgaggtcggaatcgaaggcctcacaacccgtaagctcgcccagaagctcggggttgagcagcctacattgtactggcacgtcaagaacaagcgagctctgctagacgccttggccattgagatgcatgataggcaccaaacccactacttgcctttggaaggggagagctggcaagactttttgaggaactttgctaagagcatgcgatgcgctttgctcagtcaccgtgatggagccaaggtcgcccttggtacacggtggacggagcaacagtatgaaactgcggagaacatgttggccttcctgacccaacaaggtttctcccttgagaatgccttgtacgcaacagatgctgtgcgggttttcactctgggtgccgtattgctggatcaagagcaacaagtcgctaatgaggggagggaaacacctactactgatagtatgccgccactgcttcgacaagcctgggaactcaaagagcaccaaggtgcagagccagccttcctgttcggccttgaattgatcatagccggattggagaagcagctgaagagagaaagtgggtctcaccatcaccaccatcac

SEQ ID NO: 2013 - DNA, 639 bp, Artificial Sequence
  Nucleotides Encoding Sulfonylurea responsive repressor
atggccagactcgacaagagcaaggtgatcaacagcgcactggagctgctgaacgaggtcggaatcgaaggcctcacaacccgtaagctcgcccagaagctcggggttgagcagcctacattgtactggcacgtcaagaacaagcgagctctgctagacgccttggccattgagatgcatgataggcaccaaacccactacttgcctttggaaggggaaagctggcaagactatttgaggaactttgctaagagcatgcgatgcgctttgctcagtcaccgtgatggagccaagatcgcccttggtacacggtggacggagcaacagtatgaaactgcggagaacatgttggccttcctgacccaacaaggtttctcccttgagaatgccttgtacgcaacagatgctgtgcgggttttcactctgggtgccgtattgctggatcaagagcaacaagtcgctaaggaggagagggaaacacctactcctgatagtatgccgccactgcttcgacaagcctgggaactcaaagttcaccaaggtgcagagccagccttcctgttcggccttgaattgatcatagccggattggagaagcagctgaagagagaaagtgggtctcaccatcaccaccatcac

SEQ ID NO: 2014 - DNA, 639 bp, Artificial Sequence
  Nucleotides Encoding Sulfonylurea responsive repressor
atggccagactcgacaagagcaaggtgatcaacagcgcactggagctgctgaacgaggtcggaatcgaaggcctcacaacccgtaagctcgcccagaagctcggggttgagcagcctacattgtactggcacgtcaagaacaagcgagctctgctagacgccttggccattgagatgatggataggcaccaaacccactacttgcctttggaaggggaaagctggcaagactttttgaggaactttgctaagagcatgcgacgagctttgctcagtcaccgtgatggagccaaggtcgcccttggtacacggtggacggagcaacagtatgaaactgcggagaacatgttggccttcctgacccaacatggtttctcccttgagaatgccttgtacgcaacagatgctgtgcgggttttcactctgggtgccgtattgctggatcaagagcaacaagtcgctaaggaggagagggaaacacctactcctgatagtatgccgccactgcttcgacaagcctgggaactcaaagtgcaccaaggtgcagagccagccttcctgttcggccttgaattgatcatagccggattggagaagcagctgaagagagaaagtgggtctcaccatcaacaccatcac

SEQ ID NO: 2015 - DNA, 639 bp, Artificial Sequence
  Nucleotides Encoding Sulfonylurea responsive repressor
atggccagactcgacaagagcaaggtgatcaacagcgcactggagctgctgaacgaggtcggaatcgaaggcctcacaacccgtaagctcgcccagaagctcggggttgagcagcctacattgtactggcacgtcaagaacaagcgagctctgctagacgccttggccattgagatgcacgataggcacggcacccactacttgcctttggaaggggaaagctggcaagactacttgaggaacttcgctaagagcatgcgacgtgctttgctcagtcaccgtgatggagccaaggtctcgcttggtacacggtggacggagcaacagtatgaaactgcggagaacatgttggccttcctgacccaacaaggtttctcccttgagaatgccttgtacgcaacctcagctgtgcgtgttttcactctgggtgccgtattgctagatcaagagcagcaagtcgctaaggaggagagggaaacacctactactgatagtatgccgccactgcttcgacaagcctgggaactcaaagaacaccaaggtgcagagccagccttcctgttcggccttgaattgatcatagccggattggagaagcagctgtagagagaaagtgggtctcaccatcaccaccatcac

SEQ ID NO: 2016 - DNA, 639 bp, Artificial Sequence
  Nucleotides Encoding Sulfonylurea responsive repressor
atggccagactcgacaagagcaaggtgatcaacagcgcactggagctgctgaacgaggtcggaatcgaaggcctcacaacccgtaagctcgcccagaagctcggggttgagcagcctacattgtactggcacgtcaagaacaagcgagctctgctagacgccttggccattgagatgcatgataggcacggaacccactacttgcctttggaaggggaaagctggcaagactttttgaggaactttgctaagagcatgcgacgagctttgctcagtcaccgtgatggagccaaggtcgcccttggtacacggtggacggagcaacagtatgaaactgcggagaacatgttggccttcctgacccaacaaggtttctcccttgagaatgccttgtacgcaacaagcgctgtgcgggttttcactctgggtgccgtattgctggatcaagagggacaagtcgctaatgaggagagggaaacacctactactgatagtatgccgccactgcttcgacaagcctgggaactcaaagttcaccaaggtgcagagccagccttcctgttcggccttgaattgatcatagccggattggagaagcagctgaagagagaaagtgggtctcaccatcaccaccatcac

SEQ ID NO: 2017 - DNA, 639 bp, Artificial Sequence
  Nucleotides Encoding Sulfonylurea responsive repressor
atggccagactcgacaagagcaaggtgatcaacagcgcactggagctgctgaacgaggtcggaatcgaaggcctcacaacccgtaagctcgcccagaagctcggggttgagcagcctacattgtactggcacgtcaagaacaagcgagctctgctagacgccttggccattgagatgcatgataggcaccaaacccactacttgcctttggaaggggagagctggcaagactttttgaggaactttgctaagagcatgcgacgcgctttgctcagtcaccgtgatggagccaaggtctcccttggtacacggtggacggagcaacagtatgaaactgcggagaacatgttggccttcctgacccaacaaggtttctcccttgagaatgccttgtacgcaacagatgctgtgcgggttttcactctgggtgccgtattgctggatcaagagcaacaagtagctaaggaggagagggaaacacctactactgatagtatgccgccactgcttcgacaagcctgggaactcaaagtgcaccaaggtgcagagccagccttcctgttcggccttgaattgatcatagccggattggagaagcagctgaagagagaaagtgggtctcaccatcaccaccatcac

SEQ ID NO: 2018 - DNA, 639 bp, Artificial Sequence
  Nucleotides Encoding Sulfonylurea responsive repressor
atggccagactcgacaagagcaaggtgatcaacagcgcactggagctgctgaacgaggtcggaatcgaaggcctcacaacccgtaagctcgcccagaagctcggggttgagcagcctacattgtactggcacgtcaagaacaagcgagctctgctagacgccttggccattgagatgatggataggcaccaaacccactacttgcctttggaaggggaaagctggcaagactatttgaggaactttgctaagagcatgcgatgcgctttgctcagtcaccgtgatggagccaaggtctcccttggtacacggtggacggagcaacagtatgaaactgcggagaacatgttggccttcctgacccaacaaggtttctcccttgagaatgccttgtacgcaacagatgctgtgcgggttttcactctgggtgccgtattgctggatcaagagggacaagtcgctaatgaggagagggaaacacctactcctgatagaatgccgccactgcttcgacaagcctgggaactcaaagtgcaccaaggtgcagagccagccttcctgttcggccttgaattgatcatagccggattggagaagcagctgaagagagaaagtgggtctcaccatcaccaccatcac

SEQ ID NO: 2019 - DNA, 639 bp, Artificial Sequence
  Nucleotides Encoding Sulfonylurea responsive repressor
atggccagactcgacaagagcaaggtgatcaacagcgcactggagctgctgaacgaggtcggaatcgaaggcctcacaacccgtaagctcgcccagaagctcggggttgagcagcctacattgtactggcacgtcaagaacaagcgagctctgctagacgccttggccattgagatgatggataggcaccaaacccactacttgcctttggaaggggaaagctggcaagactatttgaggaactttgctaagagcatgcgatgcgctttgctcagtcaccgtgatggagccaaggtcgcccttggtacacggtggacggagcaacagtatgaaactgcggagaacatgttggccttcctgacccaacaaggtttctcccttgagaatgccttgtacgcaacaagcgctgtgcgggttttcactctgggtgccgtattgctggatcaagagcaacaagtcgctaaggaggagagggaaacacctactactgatagtatgccgccactgcttcgacaagcctgggaactcaaagttcaccaaggtgcagagccagccttcctgttcggccttgaattgatcatagccggattggagaagcagctgaagagagaaagtgggtctcaccatcaccaccatcac

SEQ ID NO: 2020 - DNA, 639 bp, Artificial Sequence
  Nucleotides Encoding Sulfonylurea responsive repressor
atggccagactcgacaagagcaaggtgatcaacagcgcactggagctgctgaacgaggtcggaatcgaaggcctcacaacccgtaagctcgcccagaagctcggggttgagcagcctacattgtactggcacgtcaagaacaagcgagctctgctagacgccttggccattgagatgatggataggcaccaaacccactacttgcctttggaaggggaaagctggcaagactttttgaggaactttgctaagagcatgcgatgcgctttgctcagtcaccgtgatggagccaaggtcgcccttggtacacggtggacggagcaacagtatgaaactgcggagaacatgttggccttcctgacccaacaaggtttctcccttgagaatgccttgtacgcaacaagcgctgtgcgggttttcactctgggtgccgtattgctggatcaagagcaacaagtcgctaaggaggagagggaaacacctactcctgataggatgccgccactgcttcgacaagcctgggaactcaaagttcaccaaggtgcagagccagccttcctgttcggccttgaattgctcatagccggattggagaagcagctgaagagagaaagtgggtctcaccatcaccaccatcac

SEQ ID NO: 2021 - DNA, 639 bp, Artificial Sequence
  Nucleotides Encoding Sulfonylurea responsive repressor
atggccagactcgacaagagcaaggtgatcaacagcgcactggagctgctgaacgaggtcggaatcgaaggcctcacaacccgtaagctcgcccagaagctcggggttgagcagcctacattgtactggcacgtcaagaacaagcgagctctgctagacgccttggccattgagatgcatgataggcaccaaacccactacttgcctttggaaggggaaagctggcaagactttttgaggaactttgctaagagcatgcgactagctttgctcagtcaccgtgatggagccaaggtctcccttggtacacggtggacggagcaacagtatgaaactgcggagaacatgttggccttcctgacccaacaaggtttctcccttgagaatgccttgtacgcaacagatgctgtgcgggttttcactctgggtgccgtattgctggatcaagagcaacaagtcgctaaggaggagagggaaacacctactcctgatagtatgccgccactgcttcgacaagcctgggaactcaaagttcaccaaggtgcagagccagccttcctgttcggccttgaattgatcatagccggattggagaagcagctgaagagagaaagtgggtctcaccatcaccaccatcac

SEQ ID NO: 2022 - DNA, 639 bp, Artificial Sequence
  Nucleotides Encoding Sulfonylurea responsive repressor
atggccagactcgacaagagcaaggtgatcaacagcgcactggagctgctgaacgaggtcggaatcgaaggcctcacaacccgtaagctcgcccagaagctcggggttgagcagcctacattgtactggcacgtcaagaacaagcgagctctgctagacgccttggccattgagatgatggataggcacggaacccactacttgcctttggaaggggaaagctggcaagactttttgaggaactatgctaagagcatgcgacgagctttgctcagtcaccgtgatggagccaaggtcgcccttggtacacggtggacggagcaacagtatgaaactgcggagaacatgttggcctgcctgacccaacaaggtttctcccttgagaatgccttgtacgcaacaagcgctgtgcgggttttcactctgggtgccgtattgctggatcaagagcaacaagtcgctaacgaggagagggaaacacctactactgatagtatgccgccactgcttcgacaagcctgggaactcaaagtgcaccaaggtgcagagccagccttcctgttcggccttgaattgatcatagccggattggagaagcagctgaagagagaaagtgggtctcaccatcaccaccatcac

SEQ ID NO: 2023 - DNA, 639 bp, Artificial Sequence
  Nucleotides Encoding Sulfonylurea responsive repressor
atggccagactcgacaagagcaaggtgatcaacagcgcactggagctgctgaacgaggtcggaatcgaaggcctcacaacccgtaagctcgcccagaagctcggggttgagcagcctacattgtactggcacgtcaagaacaagcgagctctgctagacgccttggccattgagatgcatgataggcaccaaacccactacttgcctttggaaggggaaagctggcaagactttttgaggaactttgctaagagcatgcgacgagctttgctcagtcaccgtgatggagccaagatcgcccttggtacacggtggacggagcaacagtatgaaactgcggagaacatgttggccttcctgacccaacaaggtttctcccttgagaatgccttgtacgcaacagatgctgtgcgggttttcactctgggtgccgtattgctggatcaagagcaacaagtcgctaaggaggagagggaaacacctactcctgatagtatgccgccactgcttcgacaagcctgggaactcaaagatcaccaaggtgcagagccagccttcctgttcggccttgaattgatcatagccggattggagaagcagctgaagagagaaagtgggtctcaccatcaccaccatcac

SEQ ID NO: 2024 - DNA, 639 bp, Artificial Sequence
  Nucleotides Encoding Sulfonylurea responsive repressor
atggccagactcgacaagagcaaggtgatcaacagcgcactggagctgctgaacgaggtcggaatcgaaggcctcacaacccgtaagctcgcccagaagctcggggttgagcagcctacattgtactggcacgtcaagaacaagcgagctctgctagacgccttggccattgagatgatggataggcaccaaacccactacttgcctttggaaggggaaagctggcaagactatttgaggaactttgctaagagcatgcgatgcgctttgctcagtcaccgtgatggagccaaggtcgcccttggtacacggtggacggagcaacagtatgaaactgcggagaacatgttggccttcctgacccaacaaggtttctcccttgagaatgccttgtacgcaacaagcgctgtgcgggttttcactctgggtgccgtattgctggatcaagagcaacaagtcgctaaggaggagagggaaacacctactcctgatagaatgccgccactgcttcgacaagcctgggaactcaaagttcaccaaggtgcagagccagccttcctgttcggccttgaattgatcatagccggattggagaagcagctgaagagagaaagtgggtctcaccatcaccaccatcac

SEQ ID NO: 2025 - DNA, 639 bp, Artificial Sequence
  Nucleotides Encoding Sulfonylurea responsive repressor
atggccagactcgacaagagcaaggtgatcaacagcgcactggagctgctgaacgaggtcggaatcgaaggcctcacaacccgtaagctcgcccagaagctcggggttgagcagcctacattgtactggcacgtcaagaacaagcgagctctgctagacgccttggccattgagatgcatgataggcaccaaacccactacttgcctttggaaggggaaagctggcaagactatttgaggaactttgctaagagcatgcgatgcgctttgctcagtcaccgtgatggagccaaggtcgcccttggtacacggtggacggagcaacagtatgaaactgcggagaacatgttggccttcctgacccaacaaggtttctcccttgagaatgccttgtacgcaacaagcgctgtacgggttttcactctgggtgccgtattgctggatcaagagggacaagtcgctaatgaggagagggaaacacctactcctgatagtatgccgccactgcttcgacaagcctgggaactcaaagtgcaccaaggtgcagagccagccttcctgttcggccttgaattgatcatagccggattggagaagcagctgaagagagaaagtgggtctcaccatcaccaccatcac

SEQ ID NO: 2026 - DNA, 639 bp, Artificial Sequence
  Nucleotides Encoding Sulfonylurea responsive repressor
atggccagactcgacaagagcaaggtgatcaacagcgcactggagctgctgaacgaggtcggaatcgaaggcctcacaacccgtaagctcgcccagaagctcggggttgagcagcctacattgtactggcacgtcaagaacaagcgagctctgctagacgccttggccattgagatgcatgataggcaccaaacccactacttgcctttggaaggggaaagctggcaagactatttgaggaactttgctaagagcatgcgatgcgctttgctcagtcaccgtgatggagccaaggtctcccttggtacacggtggacggagcaacagtatgaaactgcggagaacatgttggccttcctgacccaacaaggtttctcccttgagaatgccttgtacgcaacaagcgctgtgcgggttttcactctgggtgccgtattgctggatcaagagcaacaagtcgctaaggaggagagggaaacacctactcctgatagaatgccgccactgcttcgacaagcctgggaactcaaagtgcaccaaggtgcagagccagccttcctgttcggccttgaattgatcatagccggattggagaagcagctgaagagagaaagtgggtctcaccatcaccaccatcac

SEQ ID NO: 2027 - DNA, 639 bp, Artificial Sequence
  Nucleotides Encoding Sulfonylurea responsive repressor
atggccagactcgacaagagcaaggtgatcaacagcgcactggagctgctgaacgaggtcggaatcgaaggcctcacaacccgtaagctcgcccagaagctcggggttgagcagcctacattgtactggcacgtcaagaacaagcgagctctgctagacgccttggccattgagatgatggataggcaccaaacccactacttgcctttggaaggggaaagctggcaagactttttgaggaactttgctaagagcatgcgatgcgctttgctcagtcaccgtgatggagccaaggtctcccttggtacacggtggacggagcaacagtatgaaactgcggagaacatgttggccttcctgacccaacaaggtttctcccttgagaatgccttgtacgcaacagatgctgtgcgggttttcactctgggtgccgtattgctggatcaagagcaacaagtcgctaaggaggagagggaaacacctactcctgatagaatgccgccactgcttcaacaagcctgggaactcaaagagcaccaaggtgcagagccagccttcctgttcggccttgaattgatcatagccggattggagaagcagctgaagagagatagtgggtctcaccatcaccaccatcac

SEQ ID NO: 2028 - DNA, 639 bp, Artificial Sequence
  Nucleotides Encoding Sulfonylurea responsive repressor
atggccagactcgacaagagcaaggtgatcaacagcgcactggagctgctgaacgaggtcggaatcgaaggcctcacaacccgtaagctcgcccagaagctcggggttgagcagcctacattgtactggcacgtcaagaacaagcgagctctgctagacgccttggccattgagatgatggataggcaccaaacccactacttgcctttggaaggggaaagctggcaagactatttgaggaactttgctaagagcatgcgatgcgctttgctcagtcaccgtgatggagccaaggtcgcccttggtacacggtggacggagcaacagtatgaaactgcggagaacatgttggccttcctgacccaacaaggtttctcccttgagaatgccttgtacgcaacaagcgctgtgcgggttttcactctgggtgccgtattgctggatcaagagcaacaagtcgctaagcaggagagggaaacacctactcctgatagtatgccgccactgcttcgacaagcctgggaactcaaagtgcaccaaggtgcagagccagccttcctgttcggccttgaattgatcatagccggattggagaagcagctgaagagagaaagtgggtctcaccatcaccaccatcac

SEQ ID NO: 2029 - DNA, 639 bp, Artificial Sequence
  Nucleotides Encoding Sulfonylurea responsive repressor
atggccagactcgacaagagcaaggtgatcaacagcgcactggagctgctgaacgaggtcggaatcgaaggcctcacaacccgtaagctcgcccagaagctcggggttgagcagcctacattgtactggcacgtcaagaacaagcgagctctgctagacgccttggccattgagatgcatgataggcaccaaacccactacttgcctttggaaggggaaagctggcaagactttttgaggaactttgctaagagcatgcgacgagctttgctcagtcaccgtgatggagccaaggtcgcccttggtacacggtggacggagcaacagtatgaaactgcggagaacatgttggccttcctgacccaacaaggtttctcccttgagaatgccttgtacgcaacaagcgctgtgcgggttttcactctgggtgccgtattgctggatcaagagggacaagttgctaatgaggagagggaaacacctactcctgatagtatgccgccactgcttcgacaagcctgggaactcaaagtgcaccaaggtgcagagccagccttcctgttcggccttgaattgatcatagccggattggagaagcagctgaagagagaaagtgggtctcaccatcaccaccatcac

SEQ ID NO: 2030 - protein, 207 aa, Artificial Sequence
  Sulfonylurea responsive repressor
MARLDKSKVINSALELLNEVGIEGLTTRKLAQKLGVEQPTLYWHVKNKRALLDALAIEMMDRHQTHYSPLEGESWQDFLRNNAKSCRNALLSHRDGAKVCLGTRWTEQQYESAENMLAFLTQQGFSLENALYALDAVRVFTLGAVLFDQESQVAKEERETPTTDSMPPLLRQAWELKDHQGAEPAFLFGLELIIAGLEKQLKRESGS

SEQ ID NO: 2031 - protein, 207 aa, Artificial Sequence
  Sulfonylurea responsive repressor
MARLDKSKVINSALELLNEVGIEGLTTRKLAQKLGVEQPTLYWHVKNKRALLDALAIEMMDRHQTHYLPLEGESWQDFLRNNAKSCRNALLSHRDGAKVCLGTRWTEQQYETAENMLAFLTQQGFSLENALYALEAARVFTLGAVLFDQESQVAKEERETPTTDSMPPLLRQAWELKDHQGAEPAFLFGLELIISGLEKQLKRESGS

SEQ ID NO: 2032 - protein, 207 aa, Artificial Sequence
  Sulfonylurea responsive repressor
MARLDKSKVINSALELLNEVGIEGLTTRKLAQKLGVEQPTLYWHVKNKRALLDALAIEMMDRHQTHYSPLEGESWQDFLRNNAKSCRRALLSHRDGAKVCLGTRWTEQQYESAENMLAFLTQQGFSLENALYAVDAVRVFTLGAVLFDQESQVAKEERETPTTDSMPPLLRQAWELKDHQGAEPAFLFGLELIIAGLEKQLKAESGS

SEQ ID NO: 2033 - protein, 207 aa, Artificial Sequence
  Sulfonylurea responsive repressor
MARLDKSKVINSALELLNEVGIEGLTTRKLAQKLGVEQPTLYWHVKNKRALLDALAIEMMDRHQTHYSPLEGESWQDFLRNNAKSCRRAVLSHRDGAKVCLGTRWTEQQYESAENMLAFLTQQGFSLENALYAVSAVRVFTLGAVLFDQESQVAKEERETPTTDSMPPLLRQAWELKDHQGAEPAFLFGLELIIAGLEKQLKRESGS

SEQ ID NO: 2034 - protein, 207 aa, Artificial Sequence
  Sulfonylurea responsive repressor
MARLDKSKVINSALELLNEVGIEGLTTRKLAQKLGVEQPTLYWHVKNKRALLDALAIEMMDRHQTHYSPLEGESWQDFLRNNAKSWRCALLSHRDGAKVCLGTRWTEQQYESAENMLAFLTQQGFSLENALYALEAVRVFTLGWVLFDQESQVAKEERETPTTDSMPPLLRQAWELKDHQGAEPAFLFGLELIIAGLEKQLKAESGS

SEQ ID NO: 2035 - protein, 207 aa, Artificial Sequence
  Sulfonylurea responsive repressor
MARLDKSKVINSALELLNEVGIEGLTTRKLAQKLGVEQPTLYWHVKNKRALLDALAIEMMDRHQTHYLPLEGESWQDFLRNNAKSCRRALLSHRDGAKVCLGTRWTEQQYESAENMLAFLTQQGFSLENALYAVSAVRVFTLGCVLWDQESQVAKEERETPTTDSMPPLLRQAWELKDHQGAEPAFLFGLELIIRGLEKQLKAESGS

SEQ ID NO: 2036 - protein, 207 aa, Artificial Sequence
  Sulfonylurea responsive repressor
  VARIANT 144, 203: Xaa = Any Amino Acid
MARLDKSKVINSALELLNEVGIEGLTTRKLAQKLGVEQPTLYWHVKNKRALLDALAIEMMDRHQTHYLPLEGESWQDFLRNLAKSMRCALLSHRDGAKVCLGTRWTEQQYESAENMLAFLTQQGFSLENALYAVSAVRVFTLGXVLFDQESQVAKEERETPTTDSMPPLLRQAWELKDHQGAEPAFLFGLELIISGLEKQLKXESGS

SEQ ID NO: 2037 - protein, 207 aa, Artificial Sequence
  Sulfonylurea responsive repressor
MARLDKSKVINSALELLNEVGIEGLTTRKLAQKLGVEQPTLYWHVKNKRALLDALAIEMMDRHQTHYLPLEGESWQDFLRNNAKSCRRALLSHRDGAKVCLGTRWTEQQYESAENMLAFLCQQGFSLENALYAVSAVRVFTLGAVLFDQESQVAKEERETPTTDSMPPLLRQAWELKDHQGAEPAFLFGLELIIRGLEKQLKAESGS

SEQ ID NO: 2038 - protein, 207 aa, Artificial Sequence
  Sulfonylurea responsive repressor
MARLDKSKVINSALELLNEVGIEGLTTRKLAQKLGVEQPTLYWHVKNKRALLDALAIEMMDRHQTHYSPLEGESWQDFLRNNAKSCRRALLSHRDGAKVCLGTRWTEQQYESAENMLAFLTQQGFSLENALYALTAARVFTLGWVLFDQESQVAKEERETPTTDSMPPLLRQAWELKDHQGAEPAFLFGLELIISGLEKQLKSESGS

SEQ ID NO: 2039 - protein, 207 aa, Artificial Sequence
  Sulfonylurea responsive repressor
MARLDKSKVINSALELLNEVGIEGLTTRKLAQKLGVEQPTLYWHVKNKRALLDALAIEMMDRHQTHYSPLEGESWQDFLRNNAKSCRNALLSHRDGAKVCLGTRWTEQQYESAENMLAFLTQQGFSLENALYAVSAVRVFTLGAVLYDQESQVAKEERETPTTDSMPPLLRQAWELKDHQGAEPAFLFGLELIIRGLEKQLKAESGS

SEQ ID NO: 2040 - protein, 207 aa, Artificial Sequence
  Sulfonylurea responsive repressor
MARLDKSKVINSALELLNEVGIEGLTTRKLAQKLGVEQPTLYWHVKNKRALLDALAIEMMDRHQTHYLPLEGESWQDFLRNNAKSCRNALLSHRDGAKVCLGTRWTEQQYESAENMLAFLTQQGFSLENALYAVSAVRVFTLGAVLYDQESQVAKEERETPTTDSMPPLLRQAWELKDHQGAEPAFLFGLELIIRGLEKQLKAESGS

SEQ ID NO: 2041 - protein, 207 aa, Artificial Sequence
  Sulfonylurea responsive repressor
MARLDKSKVINSALELLNEVGIEGLTTRKLAQKLGVEQPTLYWHVKNKRALLDALAIEMMDRHQTHYLPLEGESWQDFLRNNAKSCRRALLSHRDGAKVCLGTRWTEQQYETAENMLAFLTQQGFSLENALYAVSAVRVFTLGAVLFDQESQVAKEERETPTTDSMPPLLRQAWELKDHQGAEPAFLFGLELIIRGLEKQLKRESGS

SEQ ID NO: 2042 - protein, 207 aa, Artificial Sequence
  Sulfonylurea responsive repressor
MARLDKSKVINSALELLNEVGIEGLTTRKLAQKLGVEQPTLYWHVKNKRALLDALAIEMMDRHQTHYSPLEGESWQDFLRNNAKSCRNALLSHRDGAKVCLGTRWTEQQYESAENMLAFLTQQGFSLENALYALQAVRVFTLGAVLFDQESQVAKEERETPTTDSMPPLLRQAWELKDHQGAEPAFLFGLELIIAGLEKQLKRESGS

SEQ ID NO: 2043 - protein, 207 aa, Artificial Sequence
  Sulfonylurea responsive repressor
MARLDKSKVINSALELLNEVGIEGLTTRKLAQKLGVEQPTLYWHVKNKRALLDALAIEMMDRHQTHYLPLEGESWQDFLRNNAKSCRRALLSHRDGAKVCLGTRWTEQQYETAENMLAFLTQQGFSLENALYAVSAVRVFTLGAVLFDQESQVAKEERETPTTDSMPPLLRQAWELKDHQGAEPAFLFGLELIIAGLEKQLKAESGS

SEQ ID NO: 2044 - protein, 207 aa, Artificial Sequence
  Sulfonylurea responsive repressor
MARLDKSKVINSALELLNEVGIEGLTTRKLAQKLGVEQPTLYWHVKNKRALLDALAIEMMDRHQTHYLPLEGESWQDFLRNNAKSCRRALLSHRDGAKVCLGTRWTEQQYESAENMLAFLCQQGFSLENALYAVSAVRVFTLGAVLFDQESQVAKEERETPTTDSMPPLLRQAWELKDHQGAEPAFLFGLELIIAGLEKQLKRESGS

SEQ ID NO: 2045 - protein, 207 aa, Artificial Sequence
  Sulfonylurea responsive repressor
MARLDKSKVINSALELLNEVGIEGLTTRKLAQKLGVEQPTLYWHVKNKRALLDALAIEMMDRHQTHYSPLEGESWQDFLRNNAKSCRNALLSHRDGAKVCLGTRWTEQQYESAENMLAFLTQQGFSLENALYALQAVRVFTLGWVLFDQESQVAKEERETPTTDSMPPLLRQAWELKDHQGAEPAFLFGLELIIRGLEKQLKSESGS

SEQ ID NO: 2046 - protein, 207 aa, Artificial Sequence
  Sulfonylurea responsive repressor
MARLDKSKVINSALELLNEVGIEGLTTRKLAQKLGVEQPTLYWHVKNKRALLDALAIEMMDRHQTHYSPLEGESWQDFLRNNAKSCRRALLSHRDGAKVCLGTRWTEQQYESAENMLAFLTQQGFSLENALYALEAVRVFTLGAVLFDQESQVAKEERETPTTDSMPPLLRQAWELKDHQGAEPAFLFGLELIIRGLEKQLKRESGS

SEQ ID NO: 2047 - protein, 207 aa, Artificial Sequence
  Sulfonylurea responsive repressor
MARLDKSKVINSALELLNEVGIEGLTTRKLAQKLGVEQPTLYWHVKNKRALLDALAIEMMDRHQTHYSPLEGESWQDFLRNNAKSCRRALLSHRDGAKVCLGTRWTEQQYESAENMLAFLTQQGFSLENALYAVSAVRVFTLGAVLFDQESQVAKEERETPTTDSMPPLLRQAWELKDHQGAEPAFLFGLELIIRGLEKQLKRECGS

SEQ ID NO: 2048 - protein, 207 aa, Artificial Sequence
  Sulfonylurea responsive repressor
MARLDKSKVINSALELLNEVGIEGLTTRKLAQKLGVEQPTLYWHVKNKRALLDALAIEMMDRHQTHYSPLEGESWQDFLRNNAKSCRNALLSHRDGAKVCLGTRWTEQQYESAENMLAFLTQQGFSLENALYAVSAVRVFTLGAVLFDQESQVAKEERETPTTDSMPPLLRQAWELKDHQGAEPAFLFGLELIISGLEKQLKSESGS

SEQ ID NO: 2049 - protein, 207 aa, Artificial Sequence
  Sulfonylurea responsive repressor
MARLDKSKVINSALELLNEVGIEGLTTRKLAQKLGVEQPTLYWHVKNKRALLDALAIEMMDRHQTHYLPLEGESWQDFLRNNAKSCRNALLSHRDGAKVCLGTRWTEQQYESAENMLAFLTQQGFSLENALYAVSAVRVFTLGAVLFDQESQVAKEERETPTTDSMPPLLRQAWELKDHQGAEPAFLFGLELIISGLEKQLKRESGS

SEQ ID NO: 2050 - protein, 207 aa, Artificial Sequence
  Sulfonylurea responsive repressor
MARLDKSKVINSALELLNEVGIEGLTTRKLAQKLGVEQPTLYWHVKNKRALLDALAIEMMDRHQTHYSPLEGESWQDFLRNNAKSMRCALLSHRDGAKVCLGTRWTEQQYESAENMLAFLTQQGFSLENALYAVSAVRVFTLGWVLFDQESQVAKEERETPTTDSMPPLLRQAWELKDHQGAEPAFLFGLELIIAGLEKQLKRESGS

SEQ ID NO: 2051 - protein, 207 aa, Artificial Sequence
  Sulfonylurea responsive repressor
MARLDKSKVINSALELLNEVGIEGLTTRKLAQKLGVEQPTLYWHVKNKRALLDALAIEMMDRHQTHYLPLEGESWQDFLRNNAKSCRRALLSHRDGAKVCLGTRWTEQQYESAENMLAFLTQQGFSLENALYAVSAVRVFTLGAVLFDQESQVAKEERETPTTDSMPPLLRQAWELKDHQGAEPAFLFGLELIISGLEKQLKRESGS

SEQ ID NO: 2052 - protein, 207 aa, Artificial Sequence
  Sulfonylurea responsive repressor
MARLDKSKVINSALELLNEVGIEGLTTRKLAQKLGVEQPTLYWHVKNKRALLDALAIEMMDRHQTHYLPLEGESWQDFLRNNAKSCRRALLSHRDGAKVCLGTRWTEQQYESAENMLAFLTQQGFSLENALYAVSAVRVFTLGWVLFDQESQVAKEERETPTTDSMPPLLRQAWELKDHQGAEPAFLFGLELIISGLEKQLKRESGS

SEQ ID NO: 2053 - protein, 207 aa, Artificial Sequence
  Sulfonylurea responsive repressor
MARLDKSKVINSALELLNEVGIEGLTTRKLAQKLGVEQPTLYWHVKNKRALLDALAIEMLDRHQTHYSPLEGESWQDFLRNNAKSCRRALLSHRDGAKVCLGTRWTEQQYESAENMLAFLTQQGFSLENALYAVSAVRVFTLGAVLFDQESQVAKEERETPTTDSMPPLLRQAWELKDHQGAEPAFLFGLELIIAGLEKQLKSESGS

SEQ ID NO: 2054 - protein, 207 aa, Artificial Sequence
  Sulfonylurea responsive repressor
MARLDKSKVINSALELLNEVGIEGLTTRKLAQKLGVEQPTLYWHVKNKRALLDALAIEMMDRHQTHYLPLEGESWQDFLRNNAKSCRRALLSHRDGAKVCLGTRWTEQQYESAENMLAFLTQQGFSLENALYAVSAVRVFTLGAVLFDQESQVAKEERETPTTDSMPPLLRQAWELKDHQGAEPAFLFGLELIIRGLEKQLKSESGS

SEQ ID NO: 2055 - protein, 207 aa, Artificial Sequence
  Sulfonylurea responsive repressor
MARLDKSKVINSALELLNEVGIEGLTTRKLAQKLGVEQPTLYWHVKNKRALLDALAIEMMDRHQTHYSPLEGESWQDFLRNNAKSCRNALLSHRDGAKVCLGTRWTEQQYESAENMLAFLTQQGFSLENAMYALQAVRVFTLGWVLFDQESQVAKEERETPTTDSMPPLLRQAWELKDHQGAEPAFLFGLELIIAGLEKQLKRESGS

SEQ ID NO: 2056 - protein, 207 aa, Artificial Sequence
  Sulfonylurea responsive repressor
MARLDKSKVINSALELLNEVGIEGLTTRKLAQKLGVEQPTLYWHVKNKRALLDALAIEMMDRHQTHYSPLEGESWQDFLRNNAKSLRCALLSHRDGAKVCLGTRWTEQQYESAENMLAFLTQQGFSLENALYAVDAARVFTLGWVLFDQESQVAKEERETPTTDSMPPLLRQAWELKDHQGAEPAFLFGLELIIRGLEKQLKRESGS

SEQ ID NO: 2057 - protein, 207 aa, Artificial Sequence
  Sulfonylurea responsive repressor
MARLDKSKVINSALELLNEVGIEGLTTRKLAQKLGVEQPTLYWHVKNKRALLDALAIEMMDRHQTHYSPLEGESWQDFLRNNAKSCRRALLSHRDGAKVCLGTRWTEQQYETAENMLAFLTQQGFSLENALYAVSAVRVFTLGAVLFDQESQVAKEERETPTTDSMPPLLRQAWELKDHQGAEPAFLFGLELIISGLEKQLKSESGS

SEQ ID NO: 2058 - protein, 207 aa, Artificial Sequence
  Sulfonylurea responsive repressor
MARLDKSKVINSALELLNEVGIEGLTTRKLAQKLGVEQPTLYWHVKNKRALLDALAIEMMDRHQTHYLPLEGESWQDFLRNNAKSCRNALLSHRDGAKVCLGTRWTEQQYESAENMLAFLTQQGFSLENALYALDAVRVFTLGAVLFDQESQVAKEERETPTTDSMPPLLRQAWELKDHQGAEPAFLFGLELIIRGLEKQLKSESGS

SEQ ID NO: 2059 - protein, 207 aa, Artificial Sequence
  Sulfonylurea responsive repressor
MARLDKSKVINSALELLNEVGIEGLTTRKLAQKLGVEQPTLYWHVKNKRALLDALAIEMLDRHQTHYSPLEGESWQDFLRNNAKSCRRALLSHRDGAKVCLGTRWTEQQYESAENMLAFLCQQGFSLENALYAVSAVRVFTLGAVLFDQESQVAKEERETPTTDSMPPLLRQAWELKDHQGAEPAFLFGLELIIRGLEKQLKAESGS

SEQ ID NO: 2060 - protein, 207 aa, Artificial Sequence
  Sulfonylurea responsive repressor
MARLDKSKVINSALELLNEVGIEGLTTRKLAQKLGVEQPTLYWHVKNKRALLDALAIEMMDRHQTHYSPLEGESWQDFLRNNAKSFRCALLSHRDGAKVCLGTRWTEQQYESAENMLAFLTQQGFSLENALYALKAVRIFTLGAVLFDQESQVAKEERETPTTDSMPPLLRQAWELKDHQGAEPAFLFGLELIIAGLEKQLKAESGS

SEQ ID NO: 2061 - protein, 207 aa, Artificial Sequence
  Sulfonylurea responsive repressor
MARLDKSKVINSALELLNEVGIEGLTTRKLAQKLGVEQPTLYWHVKNKRALLDALAIEMMDRHQTHYCPLEGESWQDFLRNNAKSLRCALLSHRDGAKVCLGTRWTEQQYESAENMLAFLTQQGFSLENALYALQAVRIFTLGCVLFDQESQVAKEERETPTTDSMPPLLRQAWELKDHQGAEPAFLFGLELIIRGLEKQLKRESGS

SEQ ID NO: 2062 - protein, 207 aa, Artificial Sequence
  Sulfonylurea responsive repressor
MARLDKSKVINSALELLNEVGIEGLTTRKLAQKLGVEQPTLYWHVKNKRALLDALAIEMMDRHQTHYLPLEGESWQDFLRNNAKSLRCALLSHRDGAKVCLGTRWTEQQYESAENMLAFLTQQGFSLENALYALSAVRVFTLGWVLFDQESQVAKEERETPTTDSMPPLLRQAWELKDHQGAEPAFLFGLELIIAGLEKQLKRESGS

SEQ ID NO: 2063 - protein, 207 aa, Artificial Sequence
  Sulfonylurea responsive repressor
MARLDKSKVINSALELLNEVGIEGLTTRKLAQKLGVEQPTLYWHVKNKRALLDALAIEMMDRHQTHYLPLEGESWQDFLRNNAKSCRRALLSHRDGAKVCLGTRWTEQQYETAENMLAFLTQQGFSLENALYAVSAVRVFTLGAVLFDQESQVAKEERETPTTDSMPPLLRQAWELKDHQGAEPAFLFGLELIIAGLEKQLKRESGS

SEQ ID NO: 2064 - protein, 207 aa, Artificial Sequence
  Sulfonylurea responsive repressor
MARLDKSKVINSALELLNEVGIEGLTTRKLAQKLGVEQPTLYWHVKNKRALLDALAIEMMDRHQTHYSPLEGESWQDFLRNNAKSCRRALLSHRDGAKVCLGTRWTEQQYESAENMLAFLCQQGFSLENALYAVSAVRIFTLGAVLFDQESQVAKEERETPTTDSMPPLLRQAWELKDHQGAEPAFLFGLELIIAGLEKQLKRESGS

SEQ ID NO: 2065 - protein, 207 aa, Artificial Sequence
  Sulfonylurea responsive repressor
MARLDKSKVINSALELLNEVGIEGLTTRKLAQKLGVEQPTLYWHVKNKRALLDALAIEMMDRHQTHYCPLEGESWQDFLRNNAKSCRNALLSHRDGAKVCLGTRWTEQQYESAENMLAFLTQQGFSLENAMYALKAVRIFTLGCVLWDQESQVAKEERETPTTDSMPPLLRQAWELKDHQGAEPAFLFGLELIIRGLEKQLKRESGS

SEQ ID NO: 2066 - protein, 207 aa, Artificial Sequence
  Sulfonylurea responsive repressor
MARLDKSKVINSALELLNEVGIEGLTTRKLAQKLGVEQPTLYWHVKNKRALLDALAIEMMDRHQTHYSPLEGESWQDFLRNNAKSCRNALLSHRDGAKVVLGTRWTEQQYESAENMLAFLTQQGFSLENAMYALEAARIFTLGWVLFDQESQVAKEERETPTTDSMPPLLRQAWELKDHQGAEPAFLFGLELIIRGLEKQLKSESGS

SEQ ID NO: 2067 - protein, 207 aa, Artificial Sequence
  Sulfonylurea responsive repressor
MARLDKSKVINSALELLNEVGIEGLTTRKLAQKLGVEQPTLYWHVKNKRALLDALAIEMMDRHQTHYSPLEGESWQDFLRNNAKSLRCALLSHRDGAKVCLGTRWTEQQYESAENMLAFLTQQGFSLENALYALTAVRVFTLGWVLFDQESQVAKEERETPTTDSMPPLLRQAWELKDHQGAEPAFLFGLELIIAGLEKQLKRESGS

SEQ ID NO: 2068 - protein, 213 aa, Artificial Sequence
  Sulfonylurea responsive repressor
MARLDKSKVINSALELLNEVGIEGLTTRKLAQKLGVEQPTLYWHVKNKRALLDALAIEMMDRHQTHYLPLEGESWQDFLRNFAKSMRRALLSHRDGAKVSLGTRWTEQQYETAENMLAFLTQQGFPLENALYATDAVRVFTLGAVLQDQEGQVAKEERETPTTDSMPPLLRQAWELKDHQGAEPAFLFGLELIIAGLEKQLKRESGSHHHHHH

SEQ ID NO: 2069 - protein, 213 aa, Artificial Sequence
  Sulfonylurea responsive repressor
MARLDKSKVINSALELLNEVGIEGLTTRKLAQKLGVEQPTLYWHVKNKRALLDALAIEMHDRHQTHYLPLEGESWQDFLRNFAKSMRRALLSHRDGAKVSLGTRWTEQQYETAENMLAFLTQQGFSLENALYATSAVRVFTLGAVLQDQEQQVAKEERETPTPDSMPPLLRQAWELKDHQGAEPAFLFGLELIIAGLEKQLKRESGSHHHHHH

SEQ ID NO: 2070 - protein, 213 aa, Artificial Sequence
  Sulfonylurea responsive repressor
MARLDKSKVINSALELLNEVGIEGLTTRKLAQKLGVEQPTLYWHVKNKRALLDALAIEMMDRHQTHYLPLEGESWQDFLRNYAKSMRRALLSHRDGAKVALGTRWTEQQYETAENMLAFLTQQGFSLENALYATSAVRVFTLGAVLQDQEGQVAKEERETPTTDSMPPLLRQAWELKDHQGAEPAFLFGLELIIAGLEKQLKRESGSHHHHHH

SEQ ID NO: 2071 - protein, 213 aa, Artificial Sequence
  Sulfonylurea responsive repressor
MARLDKSKVINSALELLNEVGIEGLTTRKLAQKLGVEQPTLYWHVKNKRALLDALAIEMMDRHQTHYLPLEGESWQDFLRNFAKSMRRALLSHRDGAKVALGTRWTEQQYETAENMLAFLTQQGFSLENALYATSAVRVFTLGAVLLDQEQQVAKEERETPTTDSMPPLLRQAWELKDHQGAEPAFLFGLELIIAGLEKQLKRESGSHHHHHH

SEQ ID NO: 2072 - protein, 213 aa, Artificial Sequence
  Sulfonylurea responsive repressor
MARLDKSKVINSALELLNEVGIEGLTTRKLAQKLGVEQPTLYWHVKNKRALLDALAIEMMDRHGTHYLPLEGESWQDFLRNYAKSMRRALLSHRDGAKVALGTRWTEQQYETAENMLAFLTQQGFSLENALYATGAVRIFTLGAVLQDQESQVAKEERETPTTDSMPPLLRQAWELKDHQGAEPAFLFGLEVIIAGLEKQLKRESGSHHHHHH

SEQ ID NO: 2073 - protein, 201 aa, Artificial Sequence
  Sulfonylurea responsive repressor
MARLDKSKVINSALELLNEVGIEGLTTRKLAQKLGVEQPTLYWHVKNKRALLDALAIEMHDRHGTHYLPLEGESWQDFLRNFAKSMRRALLSHRDGAKVSLGTRWTEQQYETAENMLAFLTQQGFSLENALYATSAVRVFTLGAVLLDQEQQVAKEERETPTTDSMPPLLRQAWELKDHQGAEPAFLFGLELIIAGLEKQL

SEQ ID NO: 2074 - protein, 213 aa, Artificial Sequence
  Sulfonylurea responsive repressor
MARLDKSKVINSALELLNEVGIEGLTTRKLAQKLGVEQPTLYWHVKNKRALLDALAIEMMDRHGTHYLPLEGESWQDFLRNFAKSMRRALLSHRDGAKVSLGTRWTEQQYETAENMLAFLTQQGFSLENALYATSAVRVFTLGAVLQDQESQVAKEERETPTTDSMPPLLRQAWELKDHQGAEPAFLFGLELIIAGLEKQLKRESGSHHHHHH

SEQ ID NO: 2075 - protein, 213 aa, Artificial Sequence
  Sulfonylurea responsive repressor
MARLDKSKVINSALELLNEVGIEGLTTRKLAQKLGVEQPTLYWHVKNKRALLDALAIEMHDRHQTHYLPLEGESWQDFLRNFAKSMRRALLSHRDGAKVSLGTRWTEQQYETGENMLAFLTQQGFSLENALYAVDAVRVFTLGAVLQDQEGQVAKEDRETPTTDSMPPLLRQAWELKDHQGAEPAFLFGLELIIAGLEKQLKRESGSHHHHHH

SEQ ID NO: 2076 - protein, 213 aa, Artificial Sequence
  Sulfonylurea responsive repressor
MARLDKSKVINSALELLNEVGIEGLTTRKLAQKLGVEQPTLYWHVKNKRALLDALAIEMMDRHQTHYLPLEGESWQDFLRNYAKSMRRALLSHRDGAKVSLGTRWTEQQYETAENMLAFLTQQGFSLENALYATSAVRVFTLGAVLQDQEGQVANEERETPTTDSMPPLLRQAWELKDHQGAEPAFLFGLELIIAGLEKQLKRESGSHHHHHH

SEQ ID NO: 2077 - protein, 213 aa, Artificial Sequence
  Sulfonylurea responsive repressor
MARLDKSKVINSALELLNEVGIEGLTTRKLAQKLGVEQPTLYWHVKNKRALLDALAIEMMDRHQTHYLPLEGESWQDFLRNFAKSMRRALLSHRDGAKVSLGTRWTEQQYETAENMLAFLTQQGFSLENALYATSAVRVFTLGAVLQDQESQVAKEERETPTTDSMPPLLRQAWELKDHQGAEPAFLFGLELIIAGLEKQLNRESGSHHHHHH

SEQ ID NO: 2078 - protein, 213 aa, Artificial Sequence; identical to SEQ ID NO: 2068
  Sulfonylurea responsive repressor

SEQ ID NO: 2079 - protein, 213 aa, Artificial Sequence
  Sulfonylurea responsive repressor
MARLDKSKVINSALELLNEVGIEGLTTRKLAQKLGVEQPTLYWHVKNKRALLDALAIEMHDRHQTHYLPLEGESWQDFLRNFAKSMRRALLSHRDGAKVSLGTRWTEQQYETAENMLAFLTQQGFSLENALYATSAVRVFTLGAVLQDQESQVAKEERETPTTDSMPPLLRQAWELKDHQGAEPAFLFGLELIIAGLEKQLKRESGSHHHHHH

SEQ ID NO: 2080 - protein, 213 aa, Artificial Sequence
  Sulfonylurea responsive repressor
MARLDKSKVINSALELLNEVGIEGLTTRKLAQKLGVEQPTLYWHVKNKRALLDALAIEMNDRHQTHYLPLEGESWQDFLRNFAKSMRRALLSHRDGAKVSLGTRWTEQQYETAENMLAFLTQQGFSLENALYATSAVRVFTLGAVLQDQESQVAKEERETPTTDSMPPLLRQAWELKDHQGAEPAFLFGLELIIAGLEKQLKRESGSHHHHHH

SEQ ID NO: 2081 - protein, 213 aa, Artificial Sequence
  Sulfonylurea responsive repressor
MARLDKSKVINSALELLNEVGIEGLTTRKLAQKLGVEQPTLYWHVKNKRALLDALAIEMMDRHSTHYLPLEGESWQDFLRNFAKSMRRALLSHRDGAKVALGTRWTEQQYETGENMLAFLTQQGFSLENALYATSAVRVFTLGAVLQDQESQVAKEERETPTTDSMPPLLRQAWELKDHQGAEPAFLFGLELIIAGLEKQLKRESGSHHHHHH

SEQ ID NO: 2082 - protein, 213 aa, Artificial Sequence; identical to SEQ ID NO: 2070
  Sulfonylurea responsive repressor

SEQ ID NO: 2083 - protein, 213 aa, Artificial Sequence
  Sulfonylurea responsive repressor
MARLDKSKVINSALELLNEVGIEGLTTRKLAQKLGVEQPTLYWHVKNKRALLDALAIEMMDRHQTHYLPLEGESWQDFLRNFAKSMRRALLSHRDGAKVALGTRWTEQQYETAENMLAFLTQQGFSLENALYATSAVRVFTLGAVLQDQEGQVAKEERETPTTDSMPPLLRQAWELKDHQGAEPAFLFGLELIIAGLEKQLKRESGSHHHHHH

SEQ ID NO: 2084 - protein, 213 aa, Artificial Sequence
  Sulfonylurea responsive repressor
MARLDKSKVINSALELLNEVGIEGLTTRKLAQKLGVEQPTLYWHVKNKRALLDALAIEMHDRHQTHYLPLEGESWQDFLRNFAKSMRRALLSHRDGAKVALGTRWTEQQYETGENMLAFLTQQGFSLENALYATSAVRVFTLGAVLQDQEGQVAKEERETPTTDSMPPLLRQAWELKDHQGAEPAFLFGLELIIAGLEKQLKRESGSHHHHHH

SEQ ID NO: 2085 - protein, 213 aa, Artificial Sequence
  Sulfonylurea responsive repressor
MARLDKSKVINSALELLNEVGIEGLTTRKLAQKLGVEQPTLYWHVKNKRALLDALAIEMHDRHRTHYLPLEGESWQDFLRNYAKSMRRALLSHRDGAKVSLGTRWTEQQYETAENMLAFLTQQGFSLENALYATSAVRVFTLGAVLVDQEQQVAKEETETPTTDSMPPLLRQAWELKDHQGAEPAFLFGLELIIAGLEKQLKRESGSHHHHHH

SEQ ID NO: 2086 - protein, 213 aa, Artificial Sequence
  Sulfonylurea responsive repressor
MARLDKSKVINSALELLNEVGIEGLTTRKLAQKLGVEQPTLYWHVKNKRALLDALAIEMMDRHQTHYLPLEGESWQDFLRNFAKSMRRALLSHRDGAKVSLGTRWTEQQYETAENMLAFLIQQGFSLQNALYALSAVRVFTLGAVLQDQESQVAKEERETPTTDSMPPLLRQAWELKDHQGAEPAFLFGLELIIAGLEKQLKRESGSHHHHHH

SEQ ID NO: 2087 - protein, 213 aa, Artificial Sequence
  Sulfonylurea responsive repressor
MARLDKSKVINSALELLNEVGIEGLTTRKLAQKLGVEQPTLYWHVKNKRALLDALAIEMMDRHQTHYLPLEGESWQDFLRNYAKSMRRALLSHRDGAKVALGTRWTEQQYETAENMLAFLTQQGFSLENALYATGAVRVFTLGAVLQDQESHVAKVERETPTTDSMPPLLRQAWELKDHQGAEPAFLFGLELIIAGLEKQLKRESGSHHHHHH

SEQ ID NO: 2088 - protein, 201 aa, Artificial Sequence
  Sulfonylurea responsive repressor
MARLDKSKVINSALELLNEVGIEGLTTRKLAQKLGVEQPTLYWHVKNKRALLDALAIEMHDRHGTHYLPLEGESWQDFLRNFAKSMRRALLSHRDGAKVSLGTRWTEQQYETAENMLAFLTQQGFSLENALYATSAVRVFTLGAVLLDQEQQVAKEERETPTTDSMPPLLRQAWELKVHQGAEPAFLFGLELIIAGLEKQL

SEQ ID NO: 2089 - protein, 201 aa, Artificial Sequence
  Sulfonylurea responsive repressor
MARLDKSKVINSALELLNEVGIEGLTTRKLAQKLGVEQPTLYWHVKNKRALLDALAIEMHDRHGTHYLPLEGESWQDFLRNFAKSMRCALLSHRDGAKVSLGTRWTEQQYETAENMLAFLTQQGFSLENALYATSAVRVFTLGAVLLDQEQQVAKEERETPTTDRMPPLLRQAWELKDHQGAEPAFLFGLELIIAGLEKQL

SEQ ID NO: 2090 - protein, 201 aa, Artificial Sequence
  Sulfonylurea responsive repressor
MARLDKSKVINSALELLNEVGIEGLTTRKLAQKLGVEQPTLYWHVKNKRALLDALAIEMHDRHGTHYLPLEGESWQDYLRNFAKSMRRALLSHRDGAKVSLGTRWTEQQYETAENMLAFLTQQGFSLENALYATSAVRVFTLGAVLLDQEQQVAKEERETPTTDSMPPLLRQAWELKEHQGAEPAFLFGLELIIAGLEKQL

SEQ ID NO: 2091 - protein, 201 aa, Artificial Sequence
  Sulfonylurea responsive repressor
MARLDKSKVINSALELLNEVGIEGLTTRKLAQKLGVEQPTLYWHVKNKRALLDALAIEMHDRHGTHYLPLEGESWQDFLRNFAKSMRRALLSHRDGAKVSLGTRWTEQQYETAENMLAFLTQQGFSLENALYATSAVRVFTLGAVLLDQEQQVAKEERETPTTDSMPPLLRQAWELKEHQGAEPAFLFGLELIIAGLEKQL

SEQ ID NO: 2092 - protein, 213 aa, Artificial Sequence
  Sulfonylurea responsive repressor
MARLDKSKVINSALELLNEVGIEGLTTRKLAQKLGVEQPTLYWHVKNKRALLDALAIEMHDRHQTHYLPLEGESWQDYLRNFAKSMRRALLSHRDGAKVALGTRWTEQQYETAENMLAFLTQQGFSLENALYATDAVRVFTLGAVLLDQEGQVAKEERETPTTDSMPPLLRQAWELKVHQGAEPAFLFGLELIIAGLEKQLKRESGSHHHHHH

SEQ ID NO: 2093 - protein, 213 aa, Artificial Sequence
  Sulfonylurea responsive repressor
MARLDKSKVINSALELLNEVGIEGLTTRKLAQKLGVEQPTLYWHVKNKRALLDALAIEMHDRHQTHYLPLEGESWQDFLRNFAKSMRCALLSHRDGAKVALGTRWTEQQYETAENMLAFLTQQGFSLENALYATDAVRVFTLGAVLLDQEQQVANEGRETPTTDSMPPLLRQAWELKEHQGAEPAFLFGLELIIAGLEKQLKRESGSHHHHHH

SEQ ID NO: 2094 - protein, 213 aa, Artificial Sequence
  Sulfonylurea responsive repressor
MARLDKSKVINSALELLNEVGIEGLTTRKLAQKLGVEQPTLYWHVKNKRALLDALAIEMHDRHQTHYLPLEGESWQDYLRNFAKSMRCALLSHRDGAKIALGTRWTEQQYETAENMLAFLTQQGFSLENALYATDAVRVFTLGAVLLDQEQQVAKEERETPTPDSMPPLLRQAWELKVHQGAEPAFLFGLELIIAGLEKQLKRESGSHHHHHH

SEQ ID NO: 2095 - protein, 213 aa, Artificial Sequence
  Sulfonylurea responsive repressor
MARLDKSKVINSALELLNEVGIEGLTTRKLAQKLGVEQPTLYWHVKNKRALLDALAIEMMDRHQTHYLPLEGESWQDFLRNFAKSMRRALLSHRDGAKVALGTRWTEQQYETAENMLAFLTQHGFSLENALYATDAVRVFTLGAVLLDQEQQVAKEERETPTPDSMPPLLRQAWELKVHQGAEPAFLFGLELIIAGLEKQLKRESGSHHQHHH

SEQ ID NO: 2096 - protein, 213 aa, Artificial Sequence
  Sulfonylurea responsive repressor
  VARIANT 202: Xaa = Any Amino Acid
MARLDKSKVINSALELLNEVGIEGLTTRKLAQKLGVEQPTLYWHVKNKRALLDALAIEMHDRHGTHYLPLEGESWQDYLRNFAKSMRRALLSHRDGAKVSLGTRWTEQQYETAENMLAFLTQQGFSLENALYATSAVRVFTLGAVLLDQEQQVAKEERETPTTDSMPPLLRQAWELKEHQGAEPAFLFGLELIIAGLEKQLXRESGSHHHHHH

SEQ ID NO: 2097 - protein, 213 aa, Artificial Sequence
  Sulfonylurea responsive repressor
MARLDKSKVINSALELLNEVGIEGLTTRKLAQKLGVEQPTLYWHVKNKRALLDALAIEMHDRHGTHYLPLEGESWQDFLRNFAKSMRRALLSHRDGAKVALGTRWTEQQYETAENMLAFLTQQGFSLENALYATSAVRVFTLGAVLLDQEGQVANEERETPTTDSMPPLLRQAWELKVHQGAEPAFLFGLELIIAGLEKQLKRESGSHHHHHH

SEQ ID NO: 2098 - protein, 213 aa, Artificial Sequence
  Sulfonylurea responsive repressor
MARLDKSKVINSALELLNEVGIEGLTTRKLAQKLGVEQPTLYWHVKNKRALLDALAIEMHDRHQTHYLPLEGESWQDFLRNFAKSMRRALLSHRDGAKVSLGTRWTEQQYETAENMLAFLTQQGFSLENALYATDAVRVFTLGAVLLDQEQQVAKEERETPTTDSMPPLLRQAWELKVHQGAEPAFLFGLELIIAGLEKQLKRESGSHHHHHH

SEQ ID NO: 2099 - protein, 213 aa, Artificial Sequence
  Sulfonylurea responsive repressor
MARLDKSKVINSALELLNEVGIEGLTTRKLAQKLGVEQPTLYWHVKNKRALLDALAIEMMDRHQTHYLPLEGESWQDYLRNFAKSMRCALLSHRDGAKVSLGTRWTEQQYETAENMLAFLTQQGFSLENALYATDAVRVFTLGAVLLDQEGQVANEERETPTPDRMPPLLRQAWELKVHQGAEPAFLFGLELIIAGLEKQLKRESGSHHHHHH

SEQ ID NO: 2100 - protein, 213 aa, Artificial Sequence
  Sulfonylurea responsive repressor
MARLDKSKVINSALELLNEVGIEGLTTRKLAQKLGVEQPTLYWHVKNKRALLDALAIEMMDRHQTHYLPLEGESWQDYLRNFAKSMRCALLSHRDGAKVALGTRWTEQQYETAENMLAFLTQQGFSLENALYATSAVRVFTLGAVLLDQEQQVAKEERETPTTDSMPPLLRQAWELKVHQGAEPAFLFGLELIIAGLEKQLKRESGSHHHHHH

SEQ ID NO: 2101 - protein, 213 aa, Artificial Sequence
  Sulfonylurea responsive repressor
MARLDKSKVINSALELLNEVGIEGLTTRKLAQKLGVEQPTLYWHVKNKRALLDALAIEMMDRHQTHYLPLEGESWQDFLRNFAKSMRCALLSHRDGAKVALGTRWTEQQYETAENMLAFLTQQGFSLENALYATSAVRVFTLGAVLLDQEQQVAKEERETPTPDRMPPLLRQAWELKVHQGAEPAFLFGLELLIAGLEKQLKRESGSHHHHHH

SEQ ID NO: 2102 - protein, 213 aa, Artificial Sequence
  Sulfonylurea responsive repressor
MARLDKSKVINSALELLNEVGIEGLTTRKLAQKLGVEQPTLYWHVKNKRALLDALAIEMHDRHQTHYLPLEGESWQDFLRNFAKSMRLALLSHRDGAKVSLGTRWTEQQYETAENMLAFLTQQGFSLENALYATDAVRVFTLGAVLLDQEQQVAKEERETPTPDSMPPLLRQAWELKVHQGAEPAFLFGLELIIAGLEKQLKRESGSHHHHHH

SEQ ID NO: 2103 - protein, 213 aa, Artificial Sequence
  Sulfonylurea responsive repressor
MARLDKSKVINSALELLNEVGIEGLTTRKLAQKLGVEQPTLYWHVKNKRALLDALAIEMMDRHGTHYLPLEGESWQDFLRNYAKSMRRALLSHRDGAKVALGTRWTEQQYETAENMLACLTQQGFSLENALYATSAVRVFTLGAVLLDQEQQVANEERETPTTDSMPPLLRQAWELKVHQGAEPAFLFGLELIIAGLEKQLKRESGSHHHHHH

SEQ ID NO: 2104 - protein, 213 aa, Artificial Sequence
  Sulfonylurea responsive repressor
MARLDKSKVINSALELLNEVGIEGLTTRKLAQKLGVEQPTLYWHVKNKRALLDALAIEMHDRHQTHYLPLEGESWQDFLRNFAKSMRRALLSHRDGAKIALGTRWTEQQYETAENMLAFLTQQGFSLENALYATDAVRVFTLGAVLLDQEQQVAKEERETPTPDSMPPLLRQAWELKDHQGAEPAFLFGLELIIAGLEKQLKRESGSHHHHHH

SEQ ID NO: 2105 - protein, 213 aa, Artificial Sequence
  Sulfonylurea responsive repressor
MARLDKSKVINSALELLNEVGIEGLTTRKLAQKLGVEQPTLYWHVKNKRALLDALAIEMMDRHQTHYLPLEGESWQDYLRNFAKSMRCALLSHRDGAKVALGTRWTEQQYETAENMLAFLTQQGFSLENALYATSAVRVFTLGAVLLDQEQQVAKEERETPTPDRMPPLLRQAWELKVHQGAEPAFLFGLELIIAGLEKQLKRESGSHHHHHH

SEQ ID NO: 2106 - protein, 213 aa, Artificial Sequence
  Sulfonylurea responsive repressor
MARLDKSKVINSALELLNEVGIEGLTTRKLAQKLGVEQPTLYWHVKNKRALLDALAIEMHDRHQTHYLPLEGESWQDYLRNFAKSMRCALLSHRDGAKVALGTRWTEQQYETAENMLAFLTQQGFSLENALYATSAVRVFTLGAVLLDQEGQVANEERETPTPDSMPPLLRQAWELKVHQGAEPAFLFGLELIIAGLEKQLKRESGSHHHHHH

SEQ ID NO: 2107 - protein, 213 aa, Artificial Sequence
  Sulfonylurea responsive repressor
MARLDKSKVINSALELLNEVGIEGLTTRKLAQKLGVEQPTLYWHVKNKRALLDALAIEMHDRHQTHYLPLEGESWQDYLRNFAKSMRCALLSHRDGAKVSLGTRWTEQQYETAENMLAFLTQQGFSLENALYATSAVRVFTLGAVLLDQEQQVAKEERETPTPDRMPPLLRQAWELKVHQGAEPAFLFGLELIIAGLEKQLKRESGSHHHHHH

SEQ ID NO: 2108 - protein, 213 aa, Artificial Sequence
  Sulfonylurea responsive repressor
MARLDKSKVINSALELLNEVGIEGLTTRKLAQKLGVEQPTLYWHVKNKRALLDALAIEMMDRHQTHYLPLEGESWQDFLRNFAKSMRCALLSHRDGAKVSLGTRWTEQQYETAENMLAFLTQQGFSLENALYATDAVRVFTLGAVLLDQEQQVAKEERETPTPDRMPPLLQQAWELKEHQGAEPAFLFGLELIIAGLEKQLKRDSGSHHHHHH

SEQ ID NO: 2109 - protein, 213 aa, Artificial Sequence
  Sulfonylurea responsive repressor
MARLDKSKVINSALELLNEVGIEGLTTRKLAQKLGVEQPTLYWHVKNKRALLDALAIEMMDRHQTHYLPLEGESWQDYLRNFAKSMRCALLSHRDGAKVALGTRWTEQQYETAENMLAFLTQQGFSLENALYATSAVRVFTLGAVLLDQEQQVAKQERETPTPDSMPPLLRQAWELKVHQGAEPAFLFGLELIIAGLEKQLKRESGSHHHHHH

SEQ ID NO: 2110 - protein, 213 aa, Artificial Sequence
  Sulfonylurea responsive repressor
MARLDKSKVINSALELLNEVGIEGLTTRKLAQKLGVEQPTLYWHVKNKRALLDALAIEMHDRHQTHYLPLEGESWQDFLRNFAKSMRRALLSHRDGAKVALGTRWTEQQYETAENMLAFLTQQGFSLENALYATSAVRVFTLGAVLLDQEGQVANEERETPTPDSMPPLLRQAWELKVHQGAEPAFLFGLELIIAGLEKQLKRESGSHHHHHH

SEQ ID NO: 2111 - DNA, 10904 bp, Artificial Sequence
  plasmid pHD46916
agctttcttgtacaaagtggttcgataaacactagtaacggccgccagtgtgctggaattcgcccttcccaagctttgctctagatcaaactcacatccaaacataacatggatatcttccttaccaatcatactaattattttgggttaaatattaatcattatttttaagatattaattaagaaattaaaagattttttaaaaaaatgtataaaattatattattcatgatttttcatacatttgattttgataataaatatattttttttaatttcttaaaaaatgttgcaagacacttattagacatagtcttgttctgtttacaaaagcattcatcatttaatacattaaaaaatatttaatactaacagtagaatcttcttgtgagtggtgtgggagtaggcaacctggcattgaaacgagagaaagagagtcagaaccagaagacaaataaaaagtatgcaacaaacaaatcaaaatcaaagggcaaaggctggggttggctcaattggttgctacattcaattttcaactcagtcaacggttgagattcactctgacttccccaatctaagccgcggatgcaaacggttgaatctaacccacaatccaatctcgttacttaggggcttttccgtcattaactcacccctgccacccggtttccctataaattggaactcaatgctcccctctaaactcgtatcgcttcagagttgagaccaagacacactcgttcatatatctctctgctcttctcttctcttctacctctcaaggtacttttcttctccctctaccaaatcctagattccgtggttcaatttcggatcttgcacttctggtttgctttgccttgctttttcctcaactgggtccatctaggatccatgtgaaactctactctttctttaatatctgcggaatacgcgtttgactttcagatctagtcgaaatcatttcataattgcctttctttcttttagcttatgagaaataaaatcactttttttttatttcaaaataaaccttgggccttgtgctgactgagatggggtttggtgattacagaattttagcgaattttgtaattgtacttgtttgtctgtagttttgttttgttttcttgtttctcatacattccttaggcttcaattttattcgagtataggtcacaataggaattcaaactttgagcaggggaattaatcccttccttcaaatccagtttgtttgtatatatgtttaaaaaatgaaacttttgctttaaattctattataactttttttatggctgaaatttttgcatgtgtctttgctctctgttgtaaatttactgtttaggtactaactctaggcttgttgtgcagtttttgaagtataacaacagaagttcctattccgaagttcctattctctagaaagtataggaacttccaccacacaacacaatggcggccaccgcttccagaaccacccgattctcttcttcctcttcacaccccaccttccccaaacgcattactagatccaccctccctctctctcatcaaaccctcaccaaacccaaccacgctctcaaaatcaaatgttccatctccaaaccccccacggcggcgcccttcaccaaggaagcgccgaccacggagcccttcgtgtcacggttcgcctccggcgaacctcgcaagggcgcggacatccttgtggaggcgctggagaggcagggcgtgacgacggtgttcgcgtaccccggcggtgcgtcgatggagatccaccaggcgctcacgcgctccgccgccatccgcaacgtgctcccgcgccacgagcagggcggcgtcttcgccgccgaaggctacgcgcgttcctccggcctccccggcgtctgcattgccacctccggccccggcgccaccaacctcgtgagcggcctcgccgacgctttaatggacagcgtcccagtcgtcgccatcaccggccaggtcgcccgccggatgatcggcaccgacgccttccaagaaaccccgatcgtggaggtgagcagatccatcacgaagcacaactacctcatcctcgacgtcgacgacatcccccgcgtcgtcgccgaggctttcttcgtcgccacctccggccgccccggtccggtcctcatcgacattcccaaagacgttcagcagcaactcgccgtgcctaattgggacgagcccgttaacctccccggttacctcgccaggctgcccaggccccccgccgaggcccaattggaacacattgtcagactcatcatggaggcccaaaagcccgttctctacgtcggcggtggcagtttgaattccagtgctgaattgaggcgctttgttgaactcactggtattcccgttgctagcactttaatgggtcttggaacttttcctattggtgatgaatattcccttcagatgctgggtatgcatggtactgtttatgctaactatgctgttgacaatagtgatttgttgcttgcctttggggtaaggtttgatgaccgtgttactgggaagcttgaggcttttgctagtagggctaagattgttcacattgatattgattctgccgagattgggaagaacaagcaggcgcacgtgtcggtttgcgcggatttgaagttggccttgaagggaattaatatgattttggaggagaaaggagtggagggtaagtttgatcttggaggttggagagaagagattaatgtgcagaaacacaagtttccattgggttacaagacattccaggacgcgatttctccgcagcatgctatcgaggttcttgatgagttgactaatggagatgctattgttagtactggggttgggcagcatcaaatgtgggctgcgcagttttacaagtacaagagaccgaggcagtggttgacctcagggggtcttggagccatgggttttggattgcctgcggctattggtgctgctgttgctaaccctggggctgttgtggttgacattgatggggatggtagtttcatcatgaatgttcaggagttggccactataagagtggagaatctcccagttaagatattgttgttgaacaatcagcatttgggtatggtggttcagttggaggataggttctacaagtccaatagagctcacacctatcttggagatccgtctagcgagagcgagatattcccaaacatgctcaagtttgctgatgcttgtgggataccggcagcgcgagtgacgaagaaggaagagcttagagcggcaattcagagaatgttggacacccctggcccctaccttcttgatgtcattgtgccccatcaggagcatgtgttgccgatgattcccagtaatggatccttcaaggatgtgataactgagggtgatggtagaacgaggtactgattgcctagaccaaatgttccttgatgcttgttttgtacaatatatataagataatgctgtcctagttgcaggatttggcctgtggtgagcatcatagtctgtagtagttttggtagcaagacattttattttccttttatttaacttactacatgcagtagcatctatctatctctgtagtctgatatctcctgttgtctgtattgtgccgttggattttttgctgtagtgagactgaaaatgatgtgctagtaataatatttctgttagaaatctaagtagagaatctgttgaagaagtcaaaagctaatggaatcaggttacatattcaatgtttttctttttttagcggttggtagacgtgtagattcaacttctcttggagctcacctaggcaatcagtaaaatgcatattccttttttaacttgccatttatttacttttagtggaaattgtgaccaatttgttcatgtagaacggatttggaccattgcgtccacaaaacgtctcttttgctcgatcttcacaaagcgataccgaaatccagagatagttttcaaaagtcagaaatggcaaagttataaatagtaaaacagaatagatgctgtaatcgacttcaataacaagtggcatcacgtttctagttctagacccatcagctgggccggcccagctgatgatcccggtgaagttcctattccgaagttcctattctccagaaagtataggaacttcactagagcttgcggccgcgcatgctgacttaatcagctaacgccactcgagggggggcccggtaccggcgcgccgttctatagtgtcacctaaatcgtatgtgtatgatacataaggttatgtattaattgtagccgcgttctaacgacaatatgtccatatggtgcactctcagtacaatctgctctgatgccgcatagttaagccagccccgacacccgccaacacccgctgacgcgccctgacgggcttgtctgctcccggcatccgcttacagacaagctgtgaccgtctccgggagctgcatgtgtcagaggttttcaccgtcatcaccgaaacgcgcgagacgaaagggcctcgtgatacgcctatttttataggttaatgtcatgaccaaaatcccttaacgtgagttttcgttccactgagcgtcagaccccgtagaaaagatcaaaggatcttcttgagatcctttttttctgcgcgtaatctgctgcttgcaaacaaaaaaaccaccgctaccagcggtggtttgtttgccggatcaagagctaccaactctttttccgaaggtaactggcttcagcagagcgcagataccaaatactgtccttctagtgtagccgtagttaggccaccacttcaagaactctgtagcaccgcctacatacctcgctctgctaatcctgttaccagtggctgctgccagtggcgataagtcgtgtcttaccgggttggactcaagacgatagttaccggataaggcgcagcggtcgggctgaacggggggttcgtgcacacagcccagcttggagcgaacgacctacaccgaactgagatacctacagcgtgagcattgagaaagcgccacgcttcccgaagggagaaaggcggacaggtatccggtaagcggcagggtcggaacaggagagcgcacgagggagcttccagggggaaacgcctggtatctttatagtcctgtcgggtttcgccacctctgacttgagcgtcgatttttgtgatgctcgtcaggggggcggagcctatggaaaaacgccagcaacgcggcctttttacggttcctggccttttgctggccttttgctcacatgttctttcctgcgttatcccctgattctgtggataaccgtattaccgcctttgagtgagctgataccgctcgccgcagccgaacgaccgagcgcagcgagtcagtgagcgaggaagcggaagagcgcccaatacgcaaaccgcctctccccgcgcgttggccgattcattaatgcaggttgatcagatctcgatcccgcgaaattaatacgactcactatagggagaccacaacggtttccctctagaaataattttgtttaactttaagaaggagatatacccatggaaaagcctgaactcaccgcgacgtctgtcgagaagtttctgatcgaaaagttcgacagcgtctccgacctgatgcagctctcggagggcgaagaatctcgtgctttcagcttcgatgtaggagggcgtggatatgtcctgcgggtaaatagctgcgccgatggtttctacaaagatcgttatgtttatcggcactttgcatcggccgcgctcccgattccggaagtgcttgacattggggaattcagcgagagcctgacctattgcatctcccgccgtgcacagggtgtcacgttgcaagacctgcctgaaaccgaactgcccgctgttctgcagccggtcgcggaggctatggatgcgatcgctgcggccgatcttagccagacgagcgggttcggcccattcggaccgcaaggaatcggtcaatacactacatggcgtgatttcatatgcgcgattgctgatccccatgtgtatcactggcaaactgtgatggacgacaccgtcagtgcgtccgtcgcgcaggctctcgatgagctgatgctttgggccgaggactgccccgaagtccggcacctcgtgcacgcggatttcggctccaacaatgtcctgacggacaatggccgcataacagcggtcattgactggagcgaggcgatgttcggggattcccaatacgaggtcgccaacatcttcttctggaggccgtggttggcttgtatggagcagcagacgcgctacttcgagcggaggcatccggagcttgcaggatcgccgcggctccgggcgtatatgctccgcattggtcttgaccaactctatcagagcttggttgacggcaatttcgatgatgcagcttgggcgcagggtcgatgcgacgcaatcgtccgatccggagccgggactgtcgggcgtacacaaatcgcccgcagaagcgcggccgtctggaccgatggctgtgtagaagtactcgccgatagtggaaaccgacgccccagcactcgtccgagggcaaaggaatagtgaggtacagcttggatcgatccggctgctaacaaagcccgaaaggaagctgagttggctgctgccaccgctgagcaataactagcataaccccttggggcctctaaacgggtcttgaggggttttttgctgaaaggaggaactatatccggatgctcgggcgcgccggtacccgggtaccgagctcactagacgcggtgaaattacctaattaacaccggtgtttatcaaacaagtttgtacaaaaaagcaggctccggccagaatggcccggaccgggttaccgaattctagaaatccgtcaacatggtggagcacgacactctcgtctactccaagaatatcaaagatacagtctcagaagaccaaagggctattgagacttttcaacaaagggtaatatcgggaaacctcctcggattccattgcccagctatctgtcacttcatcaaaaggacagtagaaaaggaaggtggcacctacaaatgccatcattgcgataaaggaaaggctatcgttcaagatgcctctgccgacagtggtcccaaagatggacccccacccacgaggagcatcgtggaaaaagaagacgttccaaccacgtcttcaaagcaagtggattgatgtgatatctccactgacgtaagggatgacgcacaatcccactagactctatcagtgatagagtgtatataagactctatcagtgatagagtgaactctatcagtgatagagttgtacttatttttacaacaattaccaacaacaacaaacaacaaacaacattacaattactatttacaattacagtcgacatggcctcctccgaggacgtcatcaaggagttcatgcgcttcaaggtgcgcatggagggctccgtgaacggccacgagttcgagatcgagggcgagggcgagggccgcccctacgagggcacccagaccgccaagctgaaggtgaccaagggcggccccctgcccttcgcctgggacatcctgtccccccagttccagtacggctccaaggtgtacgtgaagcaccccgccgacatccccgactacaagaagctgtccttccccgagggcttcaagtgggagcgcgtgatgaacttcgaggacggcggcgtggtgaccgtgacccaggactcctccctgcaggacggctccttcatctacaaggtaagtttctgcttctacctttgatatatatataataattatcattaattagtagtaatataatatttcaaatatttttttcaaaataaaagaatgtagtatatagcaattgcttttctgtagtttataagtgtgtatattttaatttataacttttctaatatatgaccaaaacatggtgatgtgcaggtgaagttcatcggcgtgaacttcccctccgacggccccgtaatgcagaagaagactatgggctgggaggcctccaccgagcgcctgtacccccgcgacggcgtgctgaagggcgagatccacaaggccctgaagctgaaggacggcggccactacctggtggagttcaagtccatctacatggccaagaagcccgtgcagctgcccggctactactacgtggactccaagctggacatcacctcccacaacgaggactacaccatcgtggagcagtacgagcgcgccgagggccgccaccacctgttcctgtagcggccccgctgaaatcaccagtctctctctacaaatctatctctctctataataatgtgtgagtagttcccagataagggaattagggttcttatagggtttcgctcatgtgttgagcatataagaaacccttagtatgtatttgtatttgtaaaatacttctatcaataaaatttctaattcctaaaaccaaaatccagtggcgagctcgagtctagacccgggtttacttattttgtgggtatctatacttttattagatttttaatcaggctcctgatttctttttatttcgattgaattcctgaacttgtattattcagtagatcgaataaattataaaaagataaaatcataaaataatattttatcctatcaatcatattaaagcaatgaatatgtaaaattaatcttatctttattttaaaaaatcatataggtttagtatttttttaaaaataaagataggattagttttactattcactgcttattacttttaaaaaaatcataaaggtttagtatttttttaaaataaatataggaatagttttactattcactgctttaatagaaaaatagtttaaaatttaagatagttttaatcccagcatttgccacgtttgaacgtgagccgaaacgatgtcgttacattatcttaacctagctgaaacgatgtcgtcataatatcgccaaatgccaactggactacgtcgaacccacaaatcccacaaagcgcgtgaaatcaaatcgctcaaaccacaaaaaagaacaacgcgtttgttacacgctcaatcccacgcgagtagagcacagtaaccttcaaataagcgaatggggcataatcagaaatccgaaataaacctaggggcattatcggaaatgaaaagtagctcactcaatataaaaatctaggaaccctagttttcgttatcactctgtgctccctcgctctatttctcagtctctgtgtttgcggctgaggattccgaacgagtgaccttcttcgtttctcgcaaaggtaacagcctctgctcttgtctcttcgattcgatctatgcctgtctcttatttacgatgatgtttcttcggttatgtttttttatttatgctttatgctgttgatgttcggttgtttgtttcgctttgtttttgtggttcagttttttaggattcttttggtttttgaatcgattaatcggaagagattttcgagttatttggtgtgttggaggtgaatcttttttttgaggtcatagatctgttgtatttgtgttataaacatgcgactttgtatgattttttacgaggttatgatgttctggttgttttattatgaatctgttgagacagaaccatgatttttgttgatgttcgtttacactattaaaggtttgttttaacaggattaaaagttttttaagcatgttgaaggagtcttgtagatatgtaaccgtcgatagtttttttgtgggtttgttcacatgttatcaagcttaatcttttactatgtatgcgaccatatctggatccagcaaaggcgattttttaattccttgtgaaacttttgtaatatgaagttgaaattttgttattggtaaactataaatgtgtgaagttggagtatacctttaccttcttatttggctttgtgatagtttaatttatatgtattttgagttctgacttgtatttctttgaattgattctagtttaagtaatccatggccagactcgacaagagcaaggtgatcaacagcgcactggagctgctgaacgaggtcggaatcgaaggcctcacaacccgtaagctcgcccagaagctcggggttgagcagcctacattgtactggcacgtcaagaacaagcgagctctgctagacgctatggccattgagatgctcgatcgccacgctatacacttgttacccttggaaggggaaagctggcaagacttcttgaggaacaacgctaagtccatgagatgcgctttgctcagtcaccgtgatggagccaaggtctgtctaggtacgggcttcacggagcaacaatatgaaactgcggagaaccgccttgccttcctgacacaacaaggtttctcccttgagaacgccctctacgcatggcaagcagtggggatctacactctgggttgtgtcttgctggatcaagagctgcaagtcgctaaggaggagagggaaacacctactactgatagtatgccgccactggttcgacaagctctggaactcaaggatcaccaaggtgcagagccagccttcctgttcggccttgaactgatcataggcggattggagaagcagctgaagagtgaaagtgggtcttaatgataggcggccgctaaagaaggagtgcgtcgaagcagatcgttcaaacatttggcaataaagtttcttaagattgaatcctgttgccggtcttgcgatgattatcatataatttctgttgaattacgttaagcatgtaataattaacatgtaatgcatgacgttatttatgagatgggtttttatgattagagtcccgcaattatacatttaatacgcgatagaaaacaaaatatagcgcgcaaactaggataaattatcgcgcgcggtgtcatctatgttactagatcgatggatgggcaccc

SEQ ID NO: 2112 - DNA, 11868 bp, Artificial Sequence
  plasmid pHD46864
ttgtacaaagtggttcgataaacactagtaacggccgccagtgtgctggaattcgcccttcccaagctttgctctagatcaaactcacatccaaacataacatggatatcttccttaccaatcatactaattattttgggttaaatattaatcattatttttaagatattaattaagaaattaaaagattttttaaaaaaatgtataaaattatattattcatgatttttcatacatttgattttgataataaatatattttttttaatttcttaaaaaatgttgcaagacacttattagacatagtcttgttctgtttacaaaagcattcatcatttaatacattaaaaaatatttaatactaacagtagaatcttcttgtgagtggtgtgggagtaggcaacctggcattgaaacgagagaaagagagtcagaaccagaagacaaataaaaagtatgcaacaaacaaatcaaaatcaaagggcaaaggctggggttggctcaattggttgctacattcaattttcaactcagtcaacggttgagattcactctgacttccccaatctaagccgcggatgcaaacggttgaatctaacccacaatccaatctcgttacttaggggcttttccgtcattaactcacccctgccacccggtttccctataaattggaactcaatgctcccctctaaactcgtatcgcttcagagttgagaccaagacacactcgttcatatatctctctgctcttctcttctcttctacctctcaaggtacttttcttctccctctaccaaatcctagattccgtggttcaatttcggatcttgcacttctggtttgctttgccttgctttttcctcaactgggtccatctaggatccatgtgaaactctactctttctttaatatctgcggaatacgcgtttgactttcagatctagtcgaaatcatttcataattgcctttctttcttttagcttatgagaaataaaatcactttttttttatttcaaaataaaccttgggccttgtgctgactgagatggggtttggtgattacagaattttagcgaattttgtaattgtacttgtttgtctgtagttttgttttgttttcttgtttctcatacattccttaggcttcaattttattcgagtataggtcacaataggaattcaaactttgagcaggggaattaatcccttccttcaaatccagtttgtttgtatatatgtttaaaaaatgaaacttttgctttaaattctattataactttttttatggctgaaatttttgcatgtgtctttgctctctgttgtaaatttactgtttaggtactaactctaggcttgttgtgcagtttttgaagtataacaacagaagttcctattccgaagttcctattctctagaaagtataggaacttccaccacacaacacaatggcggccaccgcttccagaaccacccgattctcttcttcctcttcacaccccaccttccccaaacgcattactagatccaccctccctctctctcatcaaaccctcaccaaacccaaccacgctctcaaaatcaaatgttccatctccaaaccccccacggcggcgcccttcaccaaggaagcgccgaccacggagcccttcgtgtcacggttcgcctccggcgaacctcgcaagggcgcggacatccttgtggaggcgctggagaggcagggcgtgacgacggtgttcgcgtaccccggcggtgcgtcgatggagatccaccaggcgctcacgcgctccgccgccatccgcaacgtgctcccgcgccacgagcagggcggcgtcttcgccgccgaaggctacgcgcgttcctccggcctccccggcgtctgcattgccacctccggccccggcgccaccaacctcgtgagcggcctcgccgacgctttaatggacagcgtcccagtcgtcgccatcaccggccaggtcgcccgccggatgatcggcaccgacgccttccaagaaaccccgatcgtggaggtgagcagatccatcacgaagcacaactacctcatcctcgacgtcgacgacatcccccgcgtcgtcgccgaggctttcttcgtcgccacctccggccgccccggtccggtcctcatcgacattcccaaagacgttcagcagcaactcgccgtgcctaattgggacgagcccgttaacctccccggttacctcgccaggctgcccaggccccccgccgaggcccaattggaacacattgtcagactcatcatggaggcccaaaagcccgttctctacgtcggcggtggcagtttgaattccagtgctgaattgaggcgctttgttgaactcactggtattcccgttgctagcactttaatgggtcttggaacttttcctattggtgatgaatattcccttcagatgctgggtatgcatggtactgtttatgctaactatgctgttgacaatagtgatttgttgcttgcctttggggtaaggtttgatgaccgtgttactgggaagcttgaggcttttgctagtagggctaagattgttcacattgatattgattctgccgagattgggaagaacaagcaggcgcacgtgtcggtttgcgcggatttgaagttggccttgaagggaattaatatgattttggaggagaaaggagtggagggtaagtttgatcttggaggttggagagaagagattaatgtgcagaaacacaagtttccattgggttacaagacattccaggacgcgatttctccgcagcatgctatcgaggttcttgatgagttgactaatggagatgctattgttagtactggggttgggcagcatcaaatgtgggctgcgcagttttacaagtacaagagaccgaggcagtggttgacctcagggggtcttggagccatgggttttggattgcctgcggctattggtgctgctgttgctaaccctggggctgttgtggttgacattgatggggatggtagtttcatcatgaatgttcaggagttggccactataagagtggagaatctcccagttaagatattgttgttgaacaatcagcatttgggtatggtggttcagttggaggataggttctacaagtccaatagagctcacacctatcttggagatccgtctagcgagagcgagatattcccaaacatgctcaagtttgctgatgcttgtgggataccggcagcgcgagtgacgaagaaggaagagcttagagcggcaattcagagaatgttggacacccctggcccctaccttcttgatgtcattgtgccccatcaggagcatgtgttgccgatgattcccagtaatggatccttcaaggatgtgataactgagggtgatggtagaacgaggtactgattgcctagaccaaatgttccttgatgcttgttttgtacaatatatataagataatgctgtcctagttgcaggatttggcctgtggtgagcatcatagtctgtagtagttttggtagcaagacattttattttccttttatttaacttactacatgcagtagcatctatctatctctgtagtctgatatctcctgttgtctgtattgtgccgttggattttttgctgtagtgagactgaaaatgatgtgctagtaataatatttctgttagaaatctaagtagagaatctgttgaagaagtcaaaagctaatggaatcaggttacatattcaatgtttttctttttttagcggttggtagacgtgtagattcaacttctcttggagctcacctaggcaatcagtaaaatgcatattccttttttaacttgccatttatttacttttagtggaaattgtgaccaatttgttcatgtagaacggatttggaccattgcgtccacaaaacgtctcttttgctcgatcttcacaaagcgataccgaaatccagagatagttttcaaaagtcagaaatggcaaagttataaatagtaaaacagaatagatgctgtaatcgacttcaataacaagtggcatcacgtttctagttctagacccatcagctgggccggcccagctgatgatcccggtgaagttcctattccgaagttcctattctccagaaagtataggaacttcactagagcttgcggccgcgcatgctgacttaatcagctaacgccactcgagggggggcccggtaccggcgcgccgttctatagtgtcacctaaatcgtatgtgtatgatacataaggttatgtattaattgtagccgcgttctaacgacaatatgtccatatggtgcactctcagtacaatctgctctgatgccgcatagttaagccagccccgacacccgccaacacccgctgacgcgccctgacgggcttgtctgctcccggcatccgcttacagacaagctgtgaccgtctccgggagctgcatgtgtcagaggttttcaccgtcatcaccgaaacgcgcgagacgaaagggcctcgtgatacgcctatttttataggttaatgtcatgaccaaaatcccttaacgtgagttttcgttccactgagcgtcagaccccgtagaaaagatcaaaggatcttcttgagatcctttttttctgcgcgtaatctgctgcttgcaaacaaaaaaaccaccgctaccagcggtggtttgtttgccggatcaagagctaccaactctttttccgaaggtaactggcttcagcagagcgcagataccaaatactgtccttctagtgtagccgtagttaggccaccacttcaagaactctgtagcaccgcctacatacctcgctctgctaatcctgttaccagtggctgctgccagtggcgataagtcgtgtcttaccgggttggactcaagacgatagttaccggataaggcgcagcggtcgggctgaacggggggttcgtgcacacagcccagcttggagcgaacgacctacaccgaactgagatacctacagcgtgagcattgagaaagcgccacgcttcccgaagggagaaaggcggacaggtatccggtaagcggcagggtcggaacaggagagcgcacgagggagcttccagggggaaacgcctggtatctttatagtcctgtcgggtttcgccacctctgacttgagcgtcgatttttgtgatgctcgtcaggggggcggagcctatggaaaaacgccagcaacgcggcctttttacggttcctggccttttgctggccttttgctcacatgttctttcctgcgttatcccctgattctgtggataaccgtattaccgcctttgagtgagctgataccgctcgccgcagccgaacgaccgagcgcagcgagtcagtgagcgaggaagcggaagagcgcccaatacgcaaaccgcctctccccgcgcgttggccgattcattaatgcaggttgatcagatctcgatcccgcgaaattaatacgactcactatagggagaccacaacggtttccctctagaaataattttgtttaactttaagaaggagatatacccatggaaaagcctgaactcaccgcgacgtctgtcgagaagtttctgatcgaaaagttcgacagcgtctccgacctgatgcagctctcggagggcgaagaatctcgtgctttcagcttcgatgtaggagggcgtggatatgtcctgcgggtaaatagctgcgccgatggtttctacaaagatcgttatgtttatcggcactttgcatcggccgcgctcccgattccggaagtgcttgacattggggaattcagcgagagcctgacctattgcatctcccgccgtgcacagggtgtcacgttgcaagacctgcctgaaaccgaactgcccgctgttctgcagccggtcgcggaggctatggatgcgatcgctgcggccgatcttagccagacgagcgggttcggcccattcggaccgcaaggaatcggtcaatacactacatggcgtgatttcatatgcgcgattgctgatccccatgtgtatcactggcaaactgtgatggacgacaccgtcagtgcgtccgtcgcgcaggctctcgatgagctgatgctttgggccgaggactgccccgaagtccggcacctcgtgcacgcggatttcggctccaacaatgtcctgacggacaatggccgcataacagcggtcattgactggagcgaggcgatgttcggggattcccaatacgaggtcgccaacatcttcttctggaggccgtggttggcttgtatggagcagcagacgcgctacttcgagcggaggcatccggagcttgcaggatcgccgcggctccgggcgtatatgctccgcattggtcttgaccaactctatcagagcttggttgacggcaatttcgatgatgcagcttgggcgcagggtcgatgcgacgcaatcgtccgatccggagccgggactgtcgggcgtacacaaatcgcccgcagaagcgcggccgtctggaccgatggctgtgtagaagtactcgccgatagtggaaaccgacgccccagcactcgtccgagggcaaaggaatagtgaggtacagcttggatcgatccggctgctaacaaagcccgaaaggaagctgagttggctgctgccaccgctgagcaataactagcataaccccttggggcctctaaacgggtcttgaggggttttttgctgaaaggaggaactatatccggatgctcgggcgcgccggtacccgggtaccgagctcactagacgcggtgaaattacctaattaacaccggtgtttatcaaacaagtttgtacaaaaaagcaggctccggccagaatggcccggaccgggttaccgaattctagaaatccgtcaacatggtggagcacgacactctcgtctactccaagaatatcaaagatacagtctcagaagaccaaagggctattgagacttttcaacaaagggtaatatcgggaaacctcctcggattccattgcccagctatctgtcacttcatcaaaaggacagtagaaaaggaaggtggcacctacaaatgccatcattgcgataaaggaaaggctatcgttcaagatgcctctgccgacagtggtcccaaagatggacccccacccacgaggagcatcgtggaaaaagaagacgttccaaccacgtcttcaaagcaagtggattgatgtgatatctccactgacgtaagggatgacgcacaatcccactagactctatcagtgatagagtgtatataagactctatcagtgatagagtgaactctatcagtgatagagttgtacttatttttacaacaattaccaacaacaacaaacaacaaacaacattacaattactatttacaattacagtcgacatggcctcctccgaggacgtcatcaaggagttcatgcgcttcaaggtgcgcatggagggctccgtgaacggccacgagttcgagatcgagggcgagggcgagggccgcccctacgagggcacccagaccgccaagctgaaggtgaccaagggcggccccctgcccttcgcctgggacatcctgtccccccagttccagtacggctccaaggtgtacgtgaagcaccccgccgacatccccgactacaagaagctgtccttccccgagggcttcaagtgggagcgcgtgatgaacttcgaggacggcggcgtggtgaccgtgacccaggactcctccctgcaggacggctccttcatctacaaggtaagtttctgcttctacctttgatatatatataataattatcattaattagtagtaatataatatttcaaatatttttttcaaaataaaagaatgtagtatatagcaattgttctagctagctagggtttgggtagtgagtgtaataaagttgcaaagtttttggttaggttacgttttgaccttattattatagttcaaagggaaacattaattaaaggggattatgaagcggattggagaagcagctgaatgaggatcttactgggtgaattgagctgcttagctatggatcccacagttctacccatcaataagtgcttttgtggtagtcttgtggcttccatatctggggagcttcatttgcctttatagtattaaccttcttcagctgcttctccaatccgcacccttctcttcttttctctcataataatttaaatttgttatagactctaaactttaaatgttttttttgaagtttttccgtttttctcttttgccatgatcccgttcttgctgtggagtaaccttgtccgaggtatgtgcatgattagatccatacttaatttgtgtgcatcacgaaggtgaggttgaaatgaactttgcttttttgaccttttaggaaagttcttttgttgcagtaatcaattttaattagttttaattgacactattacttttattgtcatctttgttagttttattgttgaattgagtgcatatttcctaggaaattctcttacctaacattttttatacagatctatgctcttggctcttgcccttactcttggccttgtgttggttatttgtctacatatttattgactggtcgatgagacatgtcacaattcttgggcttatttgttggtctaataaaaggagtgcttattgaaagatcaagacggagattcggttttatataaataaactaaagatgacatattagtgtgttgatgtctcttcaggataatttttgtttgaaataatatggtaatgtcttgtctaaatttgtgtacataattcttactgattttttggattgttggatttttataaacaaatctcaattgcttttctgtagtttataagtgtgtatattttaatttataacttttctaatatatgaccaaaacatggtgatgtgcaggtgaagttcatcggcgtgaacttcccctccgacggccccgtaatgcagaagaagactatgggctgggaggcctccaccgagcgcctgtacccccgcgacggcgtgctgaagggcgagatccacaaggccctgaagctgaaggacggcggccactacctggtggagttcaagtccatctacatggccaagaagcccgtgcagctgcccggctactactacgtggactccaagctggacatcacctcccacaacgaggactacaccatcgtggagcagtacgagcgcgccgagggccgccaccacctgttcctgtagcggccccgctgaaatcaccagtctctctctacaaatctatctctctctataataatgtgtgagtagttcccagataagggaattagggttcttatagggtttcgctcatgtgttgagcatataagaaacccttagtatgtatttgtatttgtaaaatacttctatcaataaaatttctaattcctaaaaccaaaatccagtggcgagctcgagtctagacccgggtttacttattttgtgggtatctatacttttattagatttttaatcaggctcctgatttctttttatttcgattgaattcctgaacttgtattattcagtagatcgaataaattataaaaagataaaatcataaaataatattttatcctatcaatcatattaaagcaatgaatatgtaaaattaatcttatctttattttaaaaaatcatataggtttagtatttttttaaaaataaagataggattagttttactattcactgcttattacttttaaaaaaatcataaaggtttagtatttttttaaaataaatataggaatagttttactattcactgctttaatagaaaaatagtttaaaatttaagatagttttaatcccagcatttgccacgtttgaacgtgagccgaaacgatgtcgttacattatcttaacctagctgaaacgatgtcgtcataatatcgccaaatgccaactggactacgtcgaacccacaaatcccacaaagcgcgtgaaatcaaatcgctcaaaccacaaaaaagaacaacgcgtttgttacacgctcaatcccacgcgagtagagcacagtaaccttcaaataagcgaatggggcataatcagaaatccgaaataaacctaggggcattatcggaaatgaaaagtagctcactcaatataaaaatctaggaaccctagttttcgttatcactctgtgctccctcgctctatttctcagtctctgtgtttgcggctgaggattccgaacgagtgaccttcttcgtttctcgcaaaggtaacagcctctgctcttgtctcttcgattcgatctatgcctgtctcttatttacgatgatgtttcttcggttatgtttttttatttatgctttatgctgttgatgttcggttgtttgtttcgctttgtttttgtggttcagttttttaggattcttttggtttttgaatcgattaatcggaagagattttcgagttatttggtgtgttggaggtgaatcttttttttgaggtcatagatctgttgtatttgtgttataaacatgcgactttgtatgattttttacgaggttatgatgttctggttgttttattatgaatctgttgagacagaaccatgatttttgttgatgttcgtttacactattaaaggtttgttttaacaggattaaaagttttttaagcatgttgaaggagtcttgtagatatgtaaccgtcgatagtttttttgtgggtttgttcacatgttatcaagcttaatcttttactatgtatgcgaccatatctggatccagcaaaggcgattttttaattccttgtgaaacttttgtaatatgaagttgaaattttgttattggtaaactataaatgtgtgaagttggagtatacctttaccttcttatttggctttgtgatagtttaatttatatgtattttgagttctgacttgtatttctttgaattgattctagtttaagtaatccatggccagactcgacaagagcaaggtgatcaacagcgcactggagctgctgaacgaggtcggaatcgaaggcctcacaacccgtaagctcgcccagaagctcggggttgagcagcctacattgtactggcacgtcaagaacaagcgagctctgctagacgctatggccattgagatgctcgatcgccacgctatacacttgttacccttggaaggggaaagctggcaagacttcttgaggaacaacgctaagtccatgagatgcgctttgctcagtcaccgtgatggagccaaggtctgtctaggtacgggcttcacggagcaacaatatgaaactgcggagaaccgccttgccttcctgacacaacaaggtttctcccttgagaacgccctctacgcatggcaagcagtggggatctacactctgggttgtgtcttgctggatcaagagctgcaagtcgctaaggaggagagggaaacacctactactgatagtatgccgccactggttcgacaagctctggaactcaaggatcaccaaggtgcagagccagccttcctgttcggccttgaactgatcataggcggattggagaagcagctgaagagtgaaagtgggtcttaatgataggcggccgctaaagaaggagtgcgtcgaagcagatcgttcaaacatttggcaataaagtttcttaagattgaatcctgttgccggtcttgcgatgattatcatataatttctgttgaattacgttaagcatgtaataattaacatgtaatgcatgacgttatttatgagatgggtttttatgattagagtcccgcaattatacatttaatacgcgatagaaaacaaaatatagcgcgcaaactaggataaattatcgcgcgcggtgtcatctatgttactagatcgatggatgggcacccagctttc

SEQ ID NO: 2113 - DNA, 10932 bp, Artificial Sequence
  plasmid pHD1194
aattacaacggtatatatcctgtcagccaacaccaaaacaggcgcgcctcgggatcaggatcaggatctgcggccgcatcctgcaggtcgactctagaggatcctcatcgctatcaactttgtatagaaaagttgccataggattggggccagaatggcccgggggatcctctagagaaaatcttcgtcaacatggtggagcacgacacgcttgtctactccaaaaatatcaaagatacagtctcagaagaccaaagggcaattgagacttttcaacaaagggtaatatccggaaacctcctcggattccattgcccagctatctgtcactttattgtgaagatagtggaaaaggaaggtggctcctacaaatgccatcattgcgataaaggaaaggccatcgttgaagatgcctctgccgacagtggtcccaaagatggacccccacccacgaggagcatcgtggaaaaagaagacgttccaaccacgtcttcaaagcaagtggattgatgtgatatctccactgacgtaagggatgacgcacaatcccactagactctatcagtgatagagtgtatataagactctatcagtgatagagtgaactctatcagtgatagagttgtacttatttttacaacaattaccaacaacaacaaacaacaaacaacattacaattactatttacaattacaccatggcctcctccgaggacgtcatcaaggagttcatgcgcttcaaggtgcgcatggagggctccgtgaacggccacgagttcgagatcgagggcgagggcgagggccgcccctacgagggcacccagaccgccaagctgaaggtgacaaagggcggccccctgcccttcgcctgggacatcctgtccccccagttccagtacggctccaaggtgtacgtgaagcaccccgccgacatccccgactacaagaagctgtccttccccgagggcttcaagtgggagcgcgtgatgaacttcgaggacggcggcgttgtgaccgtgacccaggactcctcccttcaggacggctccttcatctacaaggtgaagttcatcggcgtgaacttcccctccgacggccccgtaatgcagaagaagactatgggctgggaagcctccaccgagcgcctgtacccccgcgacggcgtgctgaagggcgagatccacaaggccctgaagctgaaggacggcggccactacctggtggagttcaagtctatctacatggccaagaagcccgtgcagctgcccggctactactacgtggactccaagctggacatcacctcccacaacgaggactacaccatcgtggagcagtacgagcgtgccgagggccgccaccacctgttcctgtagcgcgctgcaggtacctagatcttgttaactgagctcttttgtgatctgatgataagtggttggttcgtgtctcatgcacttgggaggtgatctatttcacctggtgtagtttgtgtttccgtcagttggaaaaacttatccctatcgatttcgttttcattttctgcttttcttttatgtaccttcgtttgggcttgtaacgggcctttgtatttcaactctcaataataatccaagtgcatgttaaacaatttgtcatctgtttcggctttgatatactactggtgaagatgggccgtactactgcatcacaacgaaaaataataataagatgaaaaacttgaagtggaaaaaaaaaaaaacttgaatgttcactactactcattgaccataatgtttaacatacatagctcaatagtatttttgtgaatatggcaacacaaacagtccaaaacaattgtctcttactataccaaaccaagggcgccgcttgtttgccactctttgtgtgcaatagtgtgattaccacatctccacattcaatatattccctgaattatctgacgattttgatggctcactgttttcccaagtcttgaattgtcttctgtgcgccagtcaaatgcatatgtgttgagtttatcttttaaatatcaagcttttgtttttaacttttgtttgtaaccaaaaactcacagtaggagtttgatcacataattttatgtttgcctttgcaatttctagtgagtctttgattaaaagcttgaaaagaaaatgcagccaagcttaccaagtaagttatgtgtattaaccagaggaagagagaatcttgcaaaatttcaacaaacacaaaaagaagtattactacgattggtggagaaagaaaacgattccaaatcttgaactgttgttgtaaaagcatagcagaaagtgggagacaaccgaaatagaaatgactataacttaatttaatgttatcattataatttcttctagcaaatatttagaaagtaaatatcacatcaacctttaatgtaattaagctttctctttttgattcatgtgagatgaaaagaaaaaaaagaagagaaaagtgtagaaaacacatcatttctaagctgaagggtcaccgaattcaggcctagaaggccatacaagtttgtacaaaaaagcaggctccataggattggaaaggtcaccggccagaatggcccggggctagcttcgtccacagacatcaacatcttatcgtcctttgaagataagataataatgttgaagataagagtgggagccaccactaaaacattgctttgtcaaaagctaaaaaagatgatgcccgacagccacttgtgtgaagcatgagaagccggtccctccactaagaaaattagtgaagcatcttccagtggtccctccactcacagctcaatcagtgagcaacaggacgaaggaaatgacgtaagccatgacgtctaatcccacactctatcagtgatagagtttatataagactctatcagtgatagagtgaactctatcagtgatagagtagatctgccagactcgacaagagcaaggtgatcaacagcgcactggagctgctgaacgaggtcggaatcgaaggcctcacaacccgtaagctcgcccagaagctcggggttgagcagcctacattgtactggcacgtcaagaacaagcgagctctgctagacgctatggccattgagatgttcgataggcacgccacccactactgtcctttggaaggggaaagctggcaagacttcttgaggaacaaggctaagtccatgagaaatgctttgctcagtcaccgtgatggagccaaggtcgctctaggtacgggcttcacggagcaacagtatgaaactgctgagaactgtcttgccttcctgacacaacaaggtttctcccttgagaacgccctctacgcatttcaagctgttgggatctacactctgggttgcgtcttgctggatcaagagctgcaagtcgctaaggaggagagggaaacacctactactgatagtatgccgccactggttcgacaagcttacgaactcaaagatcaccaaggtgcagagccagccttcctgttcggccttgaactgatcatatgtggattggagaagcagctgaagtgtgaaagtggatctgcagcgaggtttgtttctgcttctacctttgatatatatataataattatcattaattagtagtaatataatatttcaaatatttttttcaaaataaaagaatgtagtatatagcaattgcttttctgtagtttataagtgtgtatattttaatttataacttttctaatatatgaccaaaacatggtgatgcctaggtctgagatccactttcacacttcagctgcttctccaatccacatatgatcagttcaaggccgaacaggaaggctggctctgcaccttggtgatctttgagttcgtaagcttgtcgaaccagtggcggcatactatcagtagtaggtgtttccctctcctccttagcgacttgcagctcttgatccagcaagacgcaacccagagtgtagatcccaacagcttgaaatgcgtagagggcgttctcaagggagaaaccttgttgtgtcaggaaggcaagacagttctcagcagtttcatactgttgctccgtgaagcccgtacctagagcgaccttggctccatcacggtgactgagcaaagcatttctcatggacttagccttgttcctcaagaagtcttgccagctttccccttccaaaggacagtagtgggtggcgtgcctatcgaacatctcaatggccatagcgtctagcagagctcgcttgttcttgacgtgccagtacaatgtaggctgctcaaccccgagcttctgggcgagcttacgggttgtgaggccttcgattccgacctcgttcagcagctccagtgcgctgttgatcaccttgctcttgtcgagtctggcggtaccctagacttgtccatcttctggattggccaacctaattaatgtatgaaataaaaggatgcacacatagtgacatgctaatcactataatgtgggcatcaaagttgtgtgttatgtgtaattaatagttatctgaataaaagagaaagagatcatccatatttcttatcctaaatgaatgtcacgtgtctttataattctttgatgaaccagatacatttcattaaccaaatccatatacatataaatattaatcatatataattaatatcaattcggttagcaaaacaaatctagtctaggtgtgttttgcgtctagagaaaatcttcgtcaacatggtggagcacgacacgcttgtctactccaaaaatatcaaagatacagtctcagaagaccaaagggcaattgagacttttcaacaaagggtaatatccggaaacctcctcggattccattgcccagctatctgtcactttattgtgaagatagtggaaaaggaaggtggctcctacaaatgccatcattgcgataaaggaaaggccatcgttgaagatgcctctgccgacagtggtcccaaagatggacccccacccacgaggagcatcgtggaaaaagaagacgttccaaccacgtcttcaaagcaagtggattgatgtgatatctccactgacgtaagggatgacgcacaatcccactatccttcgcaagacccttcctctatataagactctatcagtgatagagtgaacacgctgaaatcaccagttgtacttatttttacaacaattaccaacaacaacaaacaacaaacaacattacaattactatttacaattacaccatggccagactcgacaagagcaaggtgatcaacagcgcactggagctgctgaacgaggtcggaatcgaaggcctcacaacccgtaagctcgcccagaagctcggggttgagcagcctacattgtactggcacgtcaagaacaagcgagctctgctagacgctatggccattgagatgttcgataggcacgccacccactactgtcctttggaaggggaaagctggcaagacttcttgaggaacaaggctaagtccatgagaaatgctttgctcagtcaccgtgatggagccaaggtcgctctaggtacgggcttcacggagcaacagtatgaaactgctgagaactgtcttgccttcctgacacaacaaggtttctcccttgagaacgccctctacgcatttcaagctgttgggatctacactctgggttgcgtcttgctggatcaagagctgcaagtcgctaaggaggagagggaaacacctactactgatagtatgccgccactggttcgacaagcttacgaactcaaagatcaccaaggtgcagagccagccttcctgttcggccttgaactgatcatatgtggattggagaagcagctgaagtgtgaaagtggatcttaatgatagctgcagaaggtacctgttaactgcgcgcgagctcaaacttatctctgttatgaatcagaagaagttcatgtctcgtttcatttaaaactttggtggtttgtgttttggggccttgtaaagcccctgatgaataattgttcaactatgtttccgttcctgtgttatacctttctttctaatgagtaatgacatcaaacttcttctgtattgaaattatgtccttgtgagtctctttatcatcgtttcgtctttacattatatgtgctacttttgtctaatgagcctgaaaagtggctccaatggtacgcactggaagatttgttggcttctggtagatatagcgacagtgttgagcttgtaatatcatgtctcttattgctaaattagttcctttcttaacagaaaccttcaaagtttttgtttttgttttcatttacctaatgtacacatacgctggccatgactaacaacatgtccaggcttagagcatatttttttctagcttaaattgttaacttgtcattcagtaaaatccgagaattgtgaagctctaattgaagctaattcgttttataaagtcagttaaaaagtatactaaattatccaacttttcttcaaaatctcaaaattctatgacaaaacgatagtctttgtttatgtcagtaccacaaagaggtggaaaaaaacaccaaaaaaacaataagcaaactatacactgagaagaaaaataaaagagagcttaatagatgttttatactaacggtagattagatcaaagatccaagctatactctacatagagcagaacccagaatcccttcatatctcttttattctagcaccgataatctactgaaaagaagacacttagagctttgtctctttgtcaaagaagtcccagccgtcatccagaagctccttacgttcattaacagaggtcaccgaattcaggcctagaaggccacccagctttcttgtacaaagtggccgttaacggccagaatggcccgcagatttaggtgacactatagaatatgcatcactagtaagctttgctctagatcaaactcacatccaaacataacatggatatcttccttaccaatcatactaattattttgggttaaatattaatcattatttttaagatattaattaagaaattaaaagattttttaaaaaaatgtataaaattatattattcatgatttttcatacatttgattttgataataaatatattttttttaatttcttaaaaaatgttgcaagacacttattagacatagtcttgttctgtttacaaaagcattcatcatttaatacattaaaaaatatttaatactaacagtagaatcttcttgtgagtggtgtgggagtaggcaacctggcattgaaacgagagaaagagagtcagaaccagaagacaaataaaaagtatgcaacaaacaaatcaaaatcaaagggcaaaggctggggttggctcaattggttgctacattcaattttcaactcagtcaacggttgagattcactctgacttccccaatctaagccgcggatgcaaacggttgaatctaacccacaatccaatctcgttacttaggggcttttccgtcattaactcacccctgccacccggtttccctataaattggaactcaatgctcccctctaaactcgtatcgcttcagagttgagaccaagacacactcgttcatatatctctctgctcttctcttctcttctacctctcaaggtacttttcttctccctctaccaaatcctagattccgtggttcaatttcggatcttgcacttctggtttgctttgccttgctttttcctcaactgggtccatctaggatccatgtgaaactctactctttctttaatatctgcggaatacgcgtttgactttcagatctagtcgaaatcatttcataattgcctttctttcttttagcttatgagaaataaaatcactttttttttatttcaaaataaaccttgggccttgtgctgactgagatggggtttggtgattacagaattttagcgaattttgtaattgtacttgtttgtctgtagttttgttttgttttcttgtttctcatacattccttaggcttcaattttattcgagtataggtcacaataggaattcaaactttgagcaggggaattaatcccttccttcaaatccagtttgtttgtatatatgtttaaaaaatgaaacttttgctttaaattctattataactttttttatggctgaaatttttgcatgtgtctttgctctctgttgtaaatttactgtttaggtactaactctaggcttgttgtgcagtttttgaagtataaccatgccacacaacacaatggcggccaccgcttccagaaccacccgattctcttcttcctcttcacaccccaccttccccaaacgcattactagatccaccctccctctctctcatcaaaccctcaccaaacccaaccacgctctcaaaatcaaatgttccatctccaaaccccccacggcggcgcccttcaccaaggaagcgccgaccacggagcccttcgtgtcacggttcgcctccggcgaacctcgcaagggcgcggacatccttgtggaggcgctggagaggcagggcgtgacgacggtgttcgcgtaccccggcggtgcgtcgatggagatccaccaggcgctcacgcgctccgccgccatccgcaacgtgctcccgcgccacgagcagggcggcgtcttcgccgccgaaggctacgcgcgttcctccggcctccccggcgtctgcattgccacctccggccccggcgccaccaacctcgtgagcggcctcgccgacgctttaatggacagcgtcccagtcgtcgccatcaccggccaggtcgcccgccggatgatcggcaccgacgccttccaagaaaccccgatcgtggaggtgagcagatccatcacgaagcacaactacctcatcctcgacgtcgacgacatcccccgcgtcgtcgccgaggctttcttcgtcgccacctccggccgccccggtccggtcctcatcgacattcccaaagacgttcagcagcaactcgccgtgcctaattgggacgagcccgttaacctccccggttacctcgccaggctgcccaggccccccgccgaggcccaattggaacacattgtcagactcatcatggaggcccaaaagcccgttctctacgtcggcggtggcagtttgaattccagtgctgaattgaggcgctttgttgaactcactggtattcccgttgctagcactttaatgggtcttggaacttttcctattggtgatgaatattcccttcagatgctgggtatgcatggtactgtttatgctaactatgctgttgacaatagtgatttgttgcttgcctttggggtaaggtttgatgaccgtgttactgggaagcttgaggcttttgctagtagggctaagattgttcacattgatattgattctgccgagattgggaagaacaagcaggcgcacgtgtcggtttgcgcggatttgaagttggccttgaagggaattaatatgattttggaggagaaaggagtggagggtaagtttgatcttggaggttggagagaagagattaatgtgcagaaacacaagtttccattgggttacaagacattccaggacgcgatttctccgcagcatgctatcgaggttcttgatgagttgactaatggagatgctattgttagtactggggttgggcagcatcaaatgtgggctgcgcagttttacaagtacaagagaccgaggcagtggttgacctcagggggtcttggagccatgggttttggattgcctgcggctattggtgctgctgttgctaaccctggggctgttgtggttgacattgatggggatggtagtttcatcatgaatgttcaggagttggccactataagagtggagaatctcccagttaagatattgttgttgaacaatcagcatttgggtatggtggttcagttggaggataggttctacaagtccaatagagctcacacctatcttggagatccgtctagcgagagcgagatattcccaaacatgctcaagtttgctgatgcttgtgggataccggcagcgcgagtgacgaagaaggaagagcttagagcggcaattcagagaatgttggacacccctggcccctaccttcttgatgtcattgtgccccatcaggagcatgtgttgccgatgattcccagtaatggatccttcaaggatgtgataactgagggtgatggtagaacgaggtactgattgcctagaccaaatgttccttgatgcttgttttgtacaatatatataagataatgctgtcctagttgcaggatttggcctgtggtgagcatcatagtctgtagtagttttggtagcaagacattttattttccttttatttaacttactacatgcagtagcatctatctatctctgtagtctgatatctcctgttgtctgtattgtgccgttggattttttgctgtagtgagactgaaaatgatgtgctagtaataatatttctgttagaaatctaagtagagaatctgttgaagaagtcaaaagctaatggaatcaggttacatattcaatgtttttctttttttagcggttggtagacgtgtagattcaacttctcttggagctcacctaggcaatcagtaaaatgcatattccttttttaacttgccatttatttacttttagtggaaattgtgaccaatttgttcatgtagaacggatttggaccattgcgtccacaaaacgtctcttttgctcgatcttcacaaagcgataccgaaatccagagatagttttcaaaagtcagaaatggcaaagttataaatagtaaaacagaatagatgctgtaatcgacttcaataacaagtggcatcacgtttctagttctagacccatcagctggcctagaaggcccgggcaactttattatacaaagttgatagattgggcgcgccgaattcatttacaattgaatatatcctgcc

SEQ ID NO: 2114 - DNA, 10318 bp, Artificial Sequence
  plasmid PhDPHP1195
aattacaacggtatatatcctgtcagccaacaccaaaacaggcgcgcctcgggatcaggatcaggatctgcggccgcatcctgcaggtcgactctagaggatcctcatcgctatcaactttgtatagaaaagttgccataggattggggccagaatggcccgggggatcctctagagaaaatcttcgtcaacatggtggagcacgacacgcttgtctactccaaaaatatcaaagatacagtctcagaagaccaaagggcaattgagacttttcaacaaagggtaatatccggaaacctcctcggattccattgcccagctatctgtcactttattgtgaagatagtggaaaaggaaggtggctcctacaaatgccatcattgcgataaaggaaaggccatcgttgaagatgcctctgccgacagtggtcccaaagatggacccccacccacgaggagcatcgtggaaaaagaagacgttccaaccacgtcttcaaagcaagtggattgatgtgatatctccactgacgtaagggatgacgcacaatcccactagactctatcagtgatagagtgtatataagactctatcagtgatagagtgaactctatcagtgatagagttgtacttatttttacaacaattaccaacaacaacaaacaacaaacaacattacaattactatttacaattacaccatggcctcctccgaggacgtcatcaaggagttcatgcgcttcaaggtgcgcatggagggctccgtgaacggccacgagttcgagatcgagggcgagggcgagggccgcccctacgagggcacccagaccgccaagctgaaggtgacaaagggcggccccctgcccttcgcctgggacatcctgtccccccagttccagtacggctccaaggtgtacgtgaagcaccccgccgacatccccgactacaagaagctgtccttccccgagggcttcaagtgggagcgcgtgatgaacttcgaggacggcggcgttgtgaccgtgacccaggactcctcccttcaggacggctccttcatctacaaggtgaagttcatcggcgtgaacttcccctccgacggccccgtaatgcagaagaagactatgggctgggaagcctccaccgagcgcctgtacccccgcgacggcgtgctgaagggcgagatccacaaggccctgaagctgaaggacggcggccactacctggtggagttcaagtctatctacatggccaagaagcccgtgcagctgcccggctactactacgtggactccaagctggacatcacctcccacaacgaggactacaccatcgtggagcagtacgagcgtgccgagggccgccaccacctgttcctgtagcgcgctgcaggtacctagatcttgttaactgagctcttttgtgatctgatgataagtggttggttcgtgtctcatgcacttgggaggtgatctatttcacctggtgtagtttgtgtttccgtcagttggaaaaacttatccctatcgatttcgttttcattttctgcttttcttttatgtaccttcgtttgggcttgtaacgggcctttgtatttcaactctcaataataatccaagtgcatgttaaacaatttgtcatctgtttcggctttgatatactactggtgaagatgggccgtactactgcatcacaacgaaaaataataataagatgaaaaacttgaagtggaaaaaaaaaaaaacttgaatgttcactactactcattgaccataatgtttaacatacatagctcaatagtatttttgtgaatatggcaacacaaacagtccaaaacaattgtctcttactataccaaaccaagggcgccgcttgtttgccactctttgtgtgcaatagtgtgattaccacatctccacattcaatatattccctgaattatctgacgattttgatggctcactgttttcccaagtcttgaattgtcttctgtgcgccagtcaaatgcatatgtgttgagtttatcttttaaatatcaagcttttgtttttaacttttgtttgtaaccaaaaactcacagtaggagtttgatcacataattttatgtttgcctttgcaatttctagtgagtctttgattaaaagcttgaaaagaaaatgcagccaagcttaccaagtaagttatgtgtattaaccagaggaagagagaatcttgcaaaatttcaacaaacacaaaaagaagtattactacgattggtggagaaagaaaacgattccaaatcttgaactgttgttgtaaaagcatagcagaaagtgggagacaaccgaaatagaaatgactataacttaatttaatgttatcattataatttcttctagcaaatatttagaaagtaaatatcacatcaacctttaatgtaattaagctttctctttttgattcatgtgagatgaaaagaaaaaaaagaagagaaaagtgtagaaaacacatcatttctaagctgaagggtcaccgaattcaggcctagaaggccatacaagtttgtacaaaaaagcaggctccataggattggaaaggtcaccggccagaatggcccggggctagcttcgtccacagacatcaacatcttatcgtcctttgaagataagataataatgttgaagataagagtgggagccaccactaaaacattgctttgtcaaaagctaaaaaagatgatgcccgacagccacttgtgtgaagcatgagaagccggtccctccactaagaaaattagtgaagcatcttccagtggtccctccactcacagctcaatcagtgagcaacaggacgaaggaaatgacgtaagccatgacgtctaatcccacactctatcagtgatagagtttatataagactctatcagtgatagagtgaactctatcagtgatagagtagatctgccagactcgacaagagcaaggtgatcaacagcgcactggagctgctgaacgaggtcggaatcgaaggcctcacaacccgtaagctcgcccagaagctcggggttgagcagcctacattgtactggcacgtcaagaacaagcgagctctgctagacgctatggccattgagatgttcgataggcacgccacccactactgtcctttggaaggggaaagctggcaagacttcttgaggaacaaggctaagtccatgagaaatgctttgctcagtcaccgtgatggagccaaggtcgctctaggtacgggcctgcagcgaggtttgtttctgcttctacctttgatatatatataataattatcattaattagtagtaatataatatttcaaatatttttttcaaaataaaagaatgtagtatatagcaattgcttttctgtagtttataagtgtgtatattttaatttataacttttctaatatatgaccaaaacatggtgatgcctaggtctgaggcccgtacctagagcgaccttggctccatcacggtgactgagcaaagcatttctcatggacttagccttgttcctcaagaagtcttgccagctttccccttccaaaggacagtagtgggtggcgtgcctatcgaacatctcaatggccatagcgtctagcagagctcgcttgttcttgacgtgccagtacaatgtaggctgctcaaccccgagcttctgggcgagcttacgggttgtgaggccttcgattccgacctcgttcagcagctccagtgcgctgttgatcaccttgctcttgtcgagtctggcggtaccctagacttgtccatcttctggattggccaacctaattaatgtatgaaataaaaggatgcacacatagtgacatgctaatcactataatgtgggcatcaaagttgtgtgttatgtgtaattaatagttatctgaataaaagagaaagagatcatccatatttcttatcctaaatgaatgtcacgtgtctttataattctttgatgaaccagatacatttcattaaccaaatccatatacatataaatattaatcatatataattaatatcaattcggttagcaaaacaaatctagtctaggtgtgttttgcgtctagagaaaatcttcgtcaacatggtggagcacgacacgcttgtctactccaaaaatatcaaagatacagtctcagaagaccaaagggcaattgagacttttcaacaaagggtaatatccggaaacctcctcggattccattgcccagctatctgtcactttattgtgaagatagtggaaaaggaaggtggctcctacaaatgccatcattgcgataaaggaaaggccatcgttgaagatgcctctgccgacagtggtcccaaagatggacccccacccacgaggagcatcgtggaaaaagaagacgttccaaccacgtcttcaaagcaagtggattgatgtgatatctccactgacgtaagggatgacgcacaatcccactatccttcgcaagacccttcctctatataagactctatcagtgatagagtgaacacgctgaaatcaccagttgtacttatttttacaacaattaccaacaacaacaaacaacaaacaacattacaattactatttacaattacaccatggccagactcgacaagagcaaggtgatcaacagcgcactggagctgctgaacgaggtcggaatcgaaggcctcacaacccgtaagctcgcccagaagctcggggttgagcagcctacattgtactggcacgtcaagaacaagcgagctctgctagacgctatggccattgagatgttcgataggcacgccacccactactgtcctttggaaggggaaagctggcaagacttcttgaggaacaaggctaagtccatgagaaatgctttgctcagtcaccgtgatggagccaaggtcgctctaggtacgggcttcacggagcaacagtatgaaactgctgagaactgtcttgccttcctgacacaacaaggtttctcccttgagaacgccctctacgcatttcaagctgttgggatctacactctgggttgcgtcttgctggatcaagagctgcaagtcgctaaggaggagagggaaacacctactactgatagtatgccgccactggttcgacaagcttacgaactcaaagatcaccaaggtgcagagccagccttcctgttcggccttgaactgatcatatgtggattggagaagcagctgaagtgtgaaagtggatcttaatgatagctgcagaaggtacctgttaactgcgcgcgagctcaaacttatctctgttatgaatcagaagaagttcatgtctcgtttcatttaaaactttggtggtttgtgttttggggccttgtaaagcccctgatgaataattgttcaactatgtttccgttcctgtgttatacctttctttctaatgagtaatgacatcaaacttcttctgtattgaaattatgtccttgtgagtctctttatcatcgtttcgtctttacattatatgtgctacttttgtctaatgagcctgaaaagtggctccaatggtacgcactggaagatttgttggcttctggtagatatagcgacagtgttgagcttgtaatatcatgtctcttattgctaaattagttcctttcttaacagaaaccttcaaagtttttgtttttgttttcatttacctaatgtacacatacgctggccatgactaacaacatgtccaggcttagagcatatttttttctagcttaaattgttaacttgtcattcagtaaaatccgagaattgtgaagctctaattgaagctaattcgttttataaagtcagttaaaaagtatactaaattatccaacttttcttcaaaatctcaaaattctatgacaaaacgatagtctttgtttatgtcagtaccacaaagaggtggaaaaaaacaccaaaaaaacaataagcaaactatacactgagaagaaaaataaaagagagcttaatagatgttttatactaacggtagattagatcaaagatccaagctatactctacatagagcagaacccagaatcccttcatatctcttttattctagcaccgataatctactgaaaagaagacacttagagctttgtctctttgtcaaagaagtcccagccgtcatccagaagctccttacgttcattaacagaggtcaccgaattcaggcctagaaggccacccagctttcttgtacaaagtggccgttaacggccagaatggcccgcagatttaggtgacactatagaatatgcatcactagtaagctttgctctagatcaaactcacatccaaacataacatggatatcttccttaccaatcatactaattattttgggttaaatattaatcattatttttaagatattaattaagaaattaaaagattttttaaaaaaatgtataaaattatattattcatgatttttcatacatttgattttgataataaatatattttttttaatttcttaaaaaatgttgcaagacacttattagacatagtcttgttctgtttacaaaagcattcatcatttaatacattaaaaaatatttaatactaacagtagaatcttcttgtgagtggtgtgggagtaggcaacctggcattgaaacgagagaaagagagtcagaaccagaagacaaataaaaagtatgcaacaaacaaatcaaaatcaaagggcaaaggctggggttggctcaattggttgctacattcaattttcaactcagtcaacggttgagattcactctgacttccccaatctaagccgcggatgcaaacggttgaatctaacccacaatccaatctcgttacttaggggcttttccgtcattaactcacccctgccacccggtttccctataaattggaactcaatgctcccctctaaactcgtatcgcttcagagttgagaccaagacacactcgttcatatatctctctgctcttctcttctcttctacctctcaaggtacttttcttctccctctaccaaatcctagattccgtggttcaatttcggatcttgcacttctggtttgctttgccttgctttttcctcaactgggtccatctaggatccatgtgaaactctactctttctttaatatctgcggaatacgcgtttgactttcagatctagtcgaaatcatttcataattgcctttctttcttttagcttatgagaaataaaatcactttttttttatttcaaaataaaccttgggccttgtgctgactgagatggggtttggtgattacagaattttagcgaattttgtaattgtacttgtttgtctgtagttttgttttgttttcttgtttctcatacattccttaggcttcaattttattcgagtataggtcacaataggaattcaaactttgagcaggggaattaatcccttccttcaaatccagtttgtttgtatatatgtttaaaaaatgaaacttttgctttaaattctattataactttttttatggctgaaatttttgcatgtgtctttgctctctgttgtaaatttactgtttaggtactaactctaggcttgttgtgcagtttttgaagtataaccatgccacacaacacaatggcggccaccgcttccagaaccacccgattctcttcttcctcttcacaccccaccttccccaaacgcattactagatccaccctccctctctctcatcaaaccctcaccaaacccaaccacgctctcaaaatcaaatgttccatctccaaaccccccacggcggcgcccttcaccaaggaagcgccgaccacggagcccttcgtgtcacggttcgcctccggcgaacctcgcaagggcgcggacatccttgtggaggcgctggagaggcagggcgtgacgacggtgttcgcgtaccccggcggtgcgtcgatggagatccaccaggcgctcacgcgctccgccgccatccgcaacgtgctcccgcgccacgagcagggcggcgtcttcgccgccgaaggctacgcgcgttcctccggcctccccggcgtctgcattgccacctccggccccggcgccaccaacctcgtgagcggcctcgccgacgctttaatggacagcgtcccagtcgtcgccatcaccggccaggtcgcccgccggatgatcggcaccgacgccttccaagaaaccccgatcgtggaggtgagcagatccatcacgaagcacaactacctcatcctcgacgtcgacgacatcccccgcgtcgtcgccgaggctttcttcgtcgccacctccggccgccccggtccggtcctcatcgacattcccaaagacgttcagcagcaactcgccgtgcctaattgggacgagcccgttaacctccccggttacctcgccaggctgcccaggccccccgccgaggcccaattggaacacattgtcagactcatcatggaggcccaaaagcccgttctctacgtcggcggtggcagtttgaattccagtgctgaattgaggcgctttgttgaactcactggtattcccgttgctagcactttaatgggtcttggaacttttcctattggtgatgaatattcccttcagatgctgggtatgcatggtactgtttatgctaactatgctgttgacaatagtgatttgttgcttgcctttggggtaaggtttgatgaccgtgttactgggaagcttgaggcttttgctagtagggctaagattgttcacattgatattgattctgccgagattgggaagaacaagcaggcgcacgtgtcggtttgcgcggatttgaagttggccttgaagggaattaatatgattttggaggagaaaggagtggagggtaagtttgatcttggaggttggagagaagagattaatgtgcagaaacacaagtttccattgggttacaagacattccaggacgcgatttctccgcagcatgctatcgaggttcttgatgagttgactaatggagatgctattgttagtactggggttgggcagcatcaaatgtgggctgcgcagttttacaagtacaagagaccgaggcagtggttgacctcagggggtcttggagccatgggttttggattgcctgcggctattggtgctgctgttgctaaccctggggctgttgtggttgacattgatggggatggtagtttcatcatgaatgttcaggagttggccactataagagtggagaatctcccagttaagatattgttgttgaacaatcagcatttgggtatggtggttcagttggaggataggttctacaagtccaatagagctcacacctatcttggagatccgtctagcgagagcgagatattcccaaacatgctcaagtttgctgatgcttgtgggataccggcagcgcgagtgacgaagaaggaagagcttagagcggcaattcagagaatgttggacacccctggcccctaccttcttgatgtcattgtgccccatcaggagcatgtgttgccgatgattcccagtaatggatccttcaaggatgtgataactgagggtgatggtagaacgaggtactgattgcctagaccaaatgttccttgatgcttgttttgtacaatatatataagataatgctgtcctagttgcaggatttggcctgtggtgagcatcatagtctgtagtagttttggtagcaagacattttattttccttttatttaacttactacatgcagtagcatctatctatctctgtagtctgatatctcctgttgtctgtattgtgccgttggattttttgctgtagtgagactgaaaatgatgtgctagtaataatatttctgttagaaatctaagtagagaatctgttgaagaagtcaaaagctaatggaatcaggttacatattcaatgtttttctttttttagcggttggtagacgtgtagattcaacttctcttggagctcacctaggcaatcagtaaaatgcatattccttttttaacttgccatttatttacttttagtggaaattgtgaccaatttgttcatgtagaacggatttggaccattgcgtccacaaaacgtctcttttgctcgatcttcacaaagcgataccgaaatccagagatagttttcaaaagtcagaaatggcaaagttataaatagtaaaacagaatagatgctgtaatcgacttcaataacaagtggcatcacgtttctagttctagacccatcagctggcctagaaggcccgggcaactttattatacaaagttgatagattgggcgcgccgaattcatttacaattgaatatatcctgcc

SEQ ID NO: 2115 - DNA, 10314 bp, Artificial Sequence
  plasmid pHD1196
aattacaacggtatatatcctgtcagccaacaccaaaacaggcgcgcctcgggatcaggatcaggatctgcggccgcatcctgcaggtcgactctagaggatcctcatcgctatcaactttgtatagaaaagttgccataggattggggccagaatggcccgggggatcctctagagaaaatcttcgtcaacatggtggagcacgacacgcttgtctactccaaaaatatcaaagatacagtctcagaagaccaaagggcaattgagacttttcaacaaagggtaatatccggaaacctcctcggattccattgcccagctatctgtcactttattgtgaagatagtggaaaaggaaggtggctcctacaaatgccatcattgcgataaaggaaaggccatcgttgaagatgcctctgccgacagtggtcccaaagatggacccccacccacgaggagcatcgtggaaaaagaagacgttccaaccacgtcttcaaagcaagtggattgatgtgatatctccactgacgtaagggatgacgcacaatcccactagactctatcagtgatagagtgtatataagactctatcagtgatagagtgaactctatcagtgatagagttgtacttatttttacaacaattaccaacaacaacaaacaacaaacaacattacaattactatttacaattacaccatggcctcctccgaggacgtcatcaaggagttcatgcgcttcaaggtgcgcatggagggctccgtgaacggccacgagttcgagatcgagggcgagggcgagggccgcccctacgagggcacccagaccgccaagctgaaggtgacaaagggcggccccctgcccttcgcctgggacatcctgtccccccagttccagtacggctccaaggtgtacgtgaagcaccccgccgacatccccgactacaagaagctgtccttccccgagggcttcaagtgggagcgcgtgatgaacttcgaggacggcggcgttgtgaccgtgacccaggactcctcccttcaggacggctccttcatctacaaggtgaagttcatcggcgtgaacttcccctccgacggccccgtaatgcagaagaagactatgggctgggaagcctccaccgagcgcctgtacccccgcgacggcgtgctgaagggcgagatccacaaggccctgaagctgaaggacggcggccactacctggtggagttcaagtctatctacatggccaagaagcccgtgcagctgcccggctactactacgtggactccaagctggacatcacctcccacaacgaggactacaccatcgtggagcagtacgagcgtgccgagggccgccaccacctgttcctgtagcgcgctgcaggtacctagatcttgttaactgagctcttttgtgatctgatgataagtggttggttcgtgtctcatgcacttgggaggtgatctatttcacctggtgtagtttgtgtttccgtcagttggaaaaacttatccctatcgatttcgttttcattttctgcttttcttttatgtaccttcgtttgggcttgtaacgggcctttgtatttcaactctcaataataatccaagtgcatgttaaacaatttgtcatctgtttcggctttgatatactactggtgaagatgggccgtactactgcatcacaacgaaaaataataataagatgaaaaacttgaagtggaaaaaaaaaaaaacttgaatgttcactactactcattgaccataatgtttaacatacatagctcaatagtatttttgtgaatatggcaacacaaacagtccaaaacaattgtctcttactataccaaaccaagggcgccgcttgtttgccactctttgtgtgcaatagtgtgattaccacatctccacattcaatatattccctgaattatctgacgattttgatggctcactgttttcccaagtcttgaattgtcttctgtgcgccagtcaaatgcatatgtgttgagtttatcttttaaatatcaagcttttgtttttaacttttgtttgtaaccaaaaactcacagtaggagtttgatcacataattttatgtttgcctttgcaatttctagtgagtctttgattaaaagcttgaaaagaaaatgcagccaagcttaccaagtaagttatgtgtattaaccagaggaagagagaatcttgcaaaatttcaacaaacacaaaaagaagtattactacgattggtggagaaagaaaacgattccaaatcttgaactgttgttgtaaaagcatagcagaaagtgggagacaaccgaaatagaaatgactataacttaatttaatgttatcattataatttcttctagcaaatatttagaaagtaaatatcacatcaacctttaatgtaattaagctttctctttttgattcatgtgagatgaaaagaaaaaaaagaagagaaaagtgtagaaaacacatcatttctaagctgaagggtcaccgaattcaggcctagaaggccatacaagtttgtacaaaaaagcaggctccataggattggaaaggtcaccggccagaatggcccggggctagcttcgtccacagacatcaacatcttatcgtcctttgaagataagataataatgttgaagataagagtgggagccaccactaaaacattgctttgtcaaaagctaaaaaagatgatgcccgacagccacttgtgtgaagcatgagaagccggtccctccactaagaaaattagtgaagcatcttccagtggtccctccactcacagctcaatcagtgagcaacaggacgaaggaaatgacgtaagccatgacgtctaatcccacactctatcagtgatagagtttatataagactctatcagtgatagagtgaactctatcagtgatagagtagatctttcacggagcaacagtatgaaactgctgagaactgtcttgccttcctgacacaacaaggtttctcccttgagaacgccctctacgcatttcaagctgttgggatctacactctgggttgcgtcttgctggatcaagagctgcaagtcgctaaggaggagagggaaacacctactactgatagtatgccgccactggttcgacaagcttacgaactcaaagatcaccaaggtgcagagccagccttcctgttcggccttgaactgatcatatgtggattggagaagcagctgaagtgtgaaagtggatctgcagcgaggtttgtttctgcttctacctttgatatatatataataattatcattaattagtagtaatataatatttcaaatatttttttcaaaataaaagaatgtagtatatagcaattgcttttctgtagtttataagtgtgtatattttaatttataacttttctaatatatgaccaaaacatggtgatgcctaggtctgagatccactttcacacttcagctgcttctccaatccacatatgatcagttcaaggccgaacaggaaggctggctctgcaccttggtgatctttgagttcgtaagcttgtcgaaccagtggcggcatactatcagtagtaggtgtttccctctcctccttagcgacttgcagctcttgatccagcaagacgcaacccagagtgtagatcccaacagcttgaaatgcgtagagggcgttctcaagggagaaaccttgttgtgtcaggaaggcaagacagttctcagcagtttcatactgttgctccgtgaaggtaccctagacttgtccatcttctggattggccaacctaattaatgtatgaaataaaaggatgcacacatagtgacatgctaatcactataatgtgggcatcaaagttgtgtgttatgtgtaattaatagttatctgaataaaagagaaagagatcatccatatttcttatcctaaatgaatgtcacgtgtctttataattctttgatgaaccagatacatttcattaaccaaatccatatacatataaatattaatcatatataattaatatcaattcggttagcaaaacaaatctagtctaggtgtgttttgcgtctagagaaaatcttcgtcaacatggtggagcacgacacgcttgtctactccaaaaatatcaaagatacagtctcagaagaccaaagggcaattgagacttttcaacaaagggtaatatccggaaacctcctcggattccattgcccagctatctgtcactttattgtgaagatagtggaaaaggaaggtggctcctacaaatgccatcattgcgataaaggaaaggccatcgttgaagatgcctctgccgacagtggtcccaaagatggacccccacccacgaggagcatcgtggaaaaagaagacgttccaaccacgtcttcaaagcaagtggattgatgtgatatctccactgacgtaagggatgacgcacaatcccactatccttcgcaagacccttcctctatataagactctatcagtgatagagtgaacacgctgaaatcaccagttgtacttatttttacaacaattaccaacaacaacaaacaacaaacaacattacaattactatttacaattacaccatggccagactcgacaagagcaaggtgatcaacagcgcactggagctgctgaacgaggtcggaatcgaaggcctcacaacccgtaagctcgcccagaagctcggggttgagcagcctacattgtactggcacgtcaagaacaagcgagctctgctagacgctatggccattgagatgttcgataggcacgccacccactactgtcctttggaaggggaaagctggcaagacttcttgaggaacaaggctaagtccatgagaaatgctttgctcagtcaccgtgatggagccaaggtcgctctaggtacgggcttcacggagcaacagtatgaaactgctgagaactgtcttgccttcctgacacaacaaggtttctcccttgagaacgccctctacgcatttcaagctgttgggatctacactctgggttgcgtcttgctggatcaagagctgcaagtcgctaaggaggagagggaaacacctactactgatagtatgccgccactggttcgacaagcttacgaactcaaagatcaccaaggtgcagagccagccttcctgttcggccttgaactgatcatatgtggattggagaagcagctgaagtgtgaaagtggatcttaatgatagctgcagaaggtacctgttaactgcgcgcgagctcaaacttatctctgttatgaatcagaagaagttcatgtctcgtttcatttaaaactttggtggtttgtgttttggggccttgtaaagcccctgatgaataattgttcaactatgtttccgttcctgtgttatacctttctttctaatgagtaatgacatcaaacttcttctgtattgaaattatgtccttgtgagtctctttatcatcgtttcgtctttacattatatgtgctacttttgtctaatgagcctgaaaagtggctccaatggtacgcactggaagatttgttggcttctggtagatatagcgacagtgttgagcttgtaatatcatgtctcttattgctaaattagttcctttcttaacagaaaccttcaaagtttttgtttttgttttcatttacctaatgtacacatacgctggccatgactaacaacatgtccaggcttagagcatatttttttctagcttaaattgttaacttgtcattcagtaaaatccgagaattgtgaagctctaattgaagctaattcgttttataaagtcagttaaaaagtatactaaattatccaacttttcttcaaaatctcaaaattctatgacaaaacgatagtctttgtttatgtcagtaccacaaagaggtggaaaaaaacaccaaaaaaacaataagcaaactatacactgagaagaaaaataaaagagagcttaatagatgttttatactaacggtagattagatcaaagatccaagctatactctacatagagcagaacccagaatcccttcatatctcttttattctagcaccgataatctactgaaaagaagacacttagagctttgtctctttgtcaaagaagtcccagccgtcatccagaagctccttacgttcattaacagaggtcaccgaattcaggcctagaaggccacccagctttcttgtacaaagtggccgttaacggccagaatggcccgcagatttaggtgacactatagaatatgcatcactagtaagctttgctctagatcaaactcacatccaaacataacatggatatcttccttaccaatcatactaattattttgggttaaatattaatcattatttttaagatattaattaagaaattaaaagattttttaaaaaaatgtataaaattatattattcatgatttttcatacatttgattttgataataaatatattttttttaatttcttaaaaaatgttgcaagacacttattagacatagtcttgttctgtttacaaaagcattcatcatttaatacattaaaaaatatttaatactaacagtagaatcttcttgtgagtggtgtgggagtaggcaacctggcattgaaacgagagaaagagagtcagaaccagaagacaaataaaaagtatgcaacaaacaaatcaaaatcaaagggcaaaggctggggttggctcaattggttgctacattcaattttcaactcagtcaacggttgagattcactctgacttccccaatctaagccgcggatgcaaacggttgaatctaacccacaatccaatctcgttacttaggggcttttccgtcattaactcacccctgccacccggtttccctataaattggaactcaatgctcccctctaaactcgtatcgcttcagagttgagaccaagacacactcgttcatatatctctctgctcttctcttctcttctacctctcaaggtacttttcttctccctctaccaaatcctagattccgtggttcaatttcggatcttgcacttctggtttgctttgccttgctttttcctcaactgggtccatctaggatccatgtgaaactctactctttctttaatatctgcggaatacgcgtttgactttcagatctagtcgaaatcatttcataattgcctttctttcttttagcttatgagaaataaaatcactttttttttatttcaaaataaaccttgggccttgtgctgactgagatggggtttggtgattacagaattttagcgaattttgtaattgtacttgtttgtctgtagttttgttttgttttcttgtttctcatacattccttaggcttcaattttattcgagtataggtcacaataggaattcaaactttgagcaggggaattaatcccttccttcaaatccagtttgtttgtatatatgtttaaaaaatgaaacttttgctttaaattctattataactttttttatggctgaaatttttgcatgtgtctttgctctctgttgtaaatttactgtttaggtactaactctaggcttgttgtgcagtttttgaagtataaccatgccacacaacacaatggcggccaccgcttccagaaccacccgattctcttcttcctcttcacaccccaccttccccaaacgcattactagatccaccctccctctctctcatcaaaccctcaccaaacccaaccacgctctcaaaatcaaatgttccatctccaaaccccccacggcggcgcccttcaccaaggaagcgccgaccacggagcccttcgtgtcacggttcgcctccggcgaacctcgcaagggcgcggacatccttgtggaggcgctggagaggcagggcgtgacgacggtgttcgcgtaccccggcggtgcgtcgatggagatccaccaggcgctcacgcgctccgccgccatccgcaacgtgctcccgcgccacgagcagggcggcgtcttcgccgccgaaggctacgcgcgttcctccggcctccccggcgtctgcattgccacctccggccccggcgccaccaacctcgtgagcggcctcgccgacgctttaatggacagcgtcccagtcgtcgccatcaccggccaggtcgcccgccggatgatcggcaccgacgccttccaagaaaccccgatcgtggaggtgagcagatccatcacgaagcacaactacctcatcctcgacgtcgacgacatcccccgcgtcgtcgccgaggctttcttcgtcgccacctccggccgccccggtccggtcctcatcgacattcccaaagacgttcagcagcaactcgccgtgcctaattgggacgagcccgttaacctccccggttacctcgccaggctgcccaggccccccgccgaggcccaattggaacacattgtcagactcatcatggaggcccaaaagcccgttctctacgtcggcggtggcagtttgaattccagtgctgaattgaggcgctttgttgaactcactggtattcccgttgctagcactttaatgggtcttggaacttttcctattggtgatgaatattcccttcagatgctgggtatgcatggtactgtttatgctaactatgctgttgacaatagtgatttgttgcttgcctttggggtaaggtttgatgaccgtgttactgggaagcttgaggcttttgctagtagggctaagattgttcacattgatattgattctgccgagattgggaagaacaagcaggcgcacgtgtcggtttgcgcggatttgaagttggccttgaagggaattaatatgattttggaggagaaaggagtggagggtaagtttgatcttggaggttggagagaagagattaatgtgcagaaacacaagtttccattgggttacaagacattccaggacgcgatttctccgcagcatgctatcgaggttcttgatgagttgactaatggagatgctattgttagtactggggttgggcagcatcaaatgtgggctgcgcagttttacaagtacaagagaccgaggcagtggttgacctcagggggtcttggagccatgggttttggattgcctgcggctattggtgctgctgttgctaaccctggggctgttgtggttgacattgatggggatggtagtttcatcatgaatgttcaggagttggccactataagagtggagaatctcccagttaagatattgttgttgaacaatcagcatttgggtatggtggttcagttggaggataggttctacaagtccaatagagctcacacctatcttggagatccgtctagcgagagcgagatattcccaaacatgctcaagtttgctgatgcttgtgggataccggcagcgcgagtgacgaagaaggaagagcttagagcggcaattcagagaatgttggacacccctggcccctaccttcttgatgtcattgtgccccatcaggagcatgtgttgccgatgattcccagtaatggatccttcaaggatgtgataactgagggtgatggtagaacgaggtactgattgcctagaccaaatgttccttgatgcttgttttgtacaatatatataagataatgctgtcctagttgcaggatttggcctgtggtgagcatcatagtctgtagtagttttggtagcaagacattttattttccttttatttaacttactacatgcagtagcatctatctatctctgtagtctgatatctcctgttgtctgtattgtgccgttggattttttgctgtagtgagactgaaaatgatgtgctagtaataatatttctgttagaaatctaagtagagaatctgttgaagaagtcaaaagctaatggaatcaggttacatattcaatgtttttctttttttagcggttggtagacgtgtagattcaacttctcttggagctcacctaggcaatcagtaaaatgcatattccttttttaacttgccatttatttacttttagtggaaattgtgaccaatttgttcatgtagaacggatttggaccattgcgtccacaaaacgtctcttttgctcgatcttcacaaagcgataccgaaatccagagatagttttcaaaagtcagaaatggcaaagttataaatagtaaaacagaatagatgctgtaatcgacttcaataacaagtggcatcacgtttctagttctagacccatcagctggcctagaaggcccgggcaactttattatacaaagttgatagattgggcgcgccgaattcatttacaattgaatatatcctgcc

SEQ ID NO: 2116 - DNA, 10330 bp, Artificial Sequence
  plasmid pHD1197
aattacaacggtatatatcctgtcagccaacaccaaaacaggcgcgcctcgggatcaggatcaggatctgcggccgcatcctgcaggtcgactctagaggatcctcatcgctatcaactttgtatagaaaagttgccataggattggggccagaatggcccgggggatcctctagagaaaatcttcgtcaacatggtggagcacgacacgcttgtctactccaaaaatatcaaagatacagtctcagaagaccaaagggcaattgagacttttcaacaaagggtaatatccggaaacctcctcggattccattgcccagctatctgtcactttattgtgaagatagtggaaaaggaaggtggctcctacaaatgccatcattgcgataaaggaaaggccatcgttgaagatgcctctgccgacagtggtcccaaagatggacccccacccacgaggagcatcgtggaaaaagaagacgttccaaccacgtcttcaaagcaagtggattgatgtgatatctccactgacgtaagggatgacgcacaatcccactagactctatcagtgatagagtgtatataagactctatcagtgatagagtgaactctatcagtgatagagttgtacttatttttacaacaattaccaacaacaacaaacaacaaacaacattacaattactatttacaattacaccatggcctcctccgaggacgtcatcaaggagttcatgcgcttcaaggtgcgcatggagggctccgtgaacggccacgagttcgagatcgagggcgagggcgagggccgcccctacgagggcacccagaccgccaagctgaaggtgacaaagggcggccccctgcccttcgcctgggacatcctgtccccccagttccagtacggctccaaggtgtacgtgaagcaccccgccgacatccccgactacaagaagctgtccttccccgagggcttcaagtgggagcgcgtgatgaacttcgaggacggcggcgttgtgaccgtgacccaggactcctcccttcaggacggctccttcatctacaaggtgaagttcatcggcgtgaacttcccctccgacggccccgtaatgcagaagaagactatgggctgggaagcctccaccgagcgcctgtacccccgcgacggcgtgctgaagggcgagatccacaaggccctgaagctgaaggacggcggccactacctggtggagttcaagtctatctacatggccaagaagcccgtgcagctgcccggctactactacgtggactccaagctggacatcacctcccacaacgaggactacaccatcgtggagcagtacgagcgtgccgagggccgccaccacctgttcctgtagcgcgctgcaggtacctagatcttgttaactgagctcttttgtgatctgatgataagtggttggttcgtgtctcatgcacttgggaggtgatctatttcacctggtgtagtttgtgtttccgtcagttggaaaaacttatccctatcgatttcgttttcattttctgcttttcttttatgtaccttcgtttgggcttgtaacgggcctttgtatttcaactctcaataataatccaagtgcatgttaaacaatttgtcatctgtttcggctttgatatactactggtgaagatgggccgtactactgcatcacaacgaaaaataataataagatgaaaaacttgaagtggaaaaaaaaaaaaacttgaatgttcactactactcattgaccataatgtttaacatacatagctcaatagtatttttgtgaatatggcaacacaaacagtccaaaacaattgtctcttactataccaaaccaagggcgccgcttgtttgccactctttgtgtgcaatagtgtgattaccacatctccacattcaatatattccctgaattatctgacgattttgatggctcactgttttcccaagtcttgaattgtcttctgtgcgccagtcaaatgcatatgtgttgagtttatcttttaaatatcaagcttttgtttttaacttttgtttgtaaccaaaaactcacagtaggagtttgatcacataattttatgtttgcctttgcaatttctagtgagtctttgattaaaagcttgaaaagaaaatgcagccaagcttaccaagtaagttatgtgtattaaccagaggaagagagaatcttgcaaaatttcaacaaacacaaaaagaagtattactacgattggtggagaaagaaaacgattccaaatcttgaactgttgttgtaaaagcatagcagaaagtgggagacaaccgaaatagaaatgactataacttaatttaatgttatcattataatttcttctagcaaatatttagaaagtaaatatcacatcaacctttaatgtaattaagctttctctttttgattcatgtgagatgaaaagaaaaaaaagaagagaaaagtgtagaaaacacatcatttctaagctgaagggtcaccgaattcaggcctagaaggccatacaagtttgtacaaaaaagcaggctccataggattggggccagaatggcccgggtctagagaaaatcttcgtcaacatggtggagcacgacacgcttgtctactccaaaaatatcaaagatacagtctcagaagaccaaagggcaattgagacttttcaacaaagggtaatatccggaaacctcctcggattccattgcccagctatctgtcactttattgtgaagatagtggaaaaggaaggtggctcctacaaatgccatcattgcgataaaggaaaggccatcgttgaagatgcctctgccgacagtggtcccaaagatggacccccacccacgaggagcatcgtggaaaaagaagacgttccaaccacgtcttcaaagcaagtggattgatgtgatatctccactgacgtaagggatgacgcacaatcccactatccttcgcaagacccttcctctatataagactctatcagtgatagagtgaacacgctgaaatcaccagttgtacttatttttacaacaattaccaacaacaacaaacaacaaacaacattacaattactatttacaattacaccatggccagactcgacaagagcaaggtgatcaacagcgcactggagctgctgaacgaggtcggaatcgaaggcctcacaacccgtaagctcgcccagaagctcggggttgagcagcctacattgtactggcacgtcaagaacaagcgagctctgctagacgctatggccattgagatgttcgataggcacgccacccactactgtcctttggaaggggaaagctggcaagacttcttgaggaacaaggctaagtccatgagaaatgctttgctcagtcaccgtgatggagccaaggtcgctctaggtacgggcttcacggagcaacagtatgaaactgctgagaactgtcttgccttcctgacacaacaaggtttctcccttgagaacgccctctacgcatttcaagctgttgggatctacactctgggttgcgtcttgctggatcaagagctgcaagtcgctaaggaggagagggaaacacctactactgatagtatgccgccactggttcgacaagcttacgaactcaaagatcaccaaggtgcagagccagccttcctgttcggccttgaactgatcatatgtggattggagaagcagctgaagtgtgaaagtggatcttaatgatagctgcagaaggtacctgttaactgcgcgcgagctcaaacttatctctgttatgaatcagaagaagttcatgtctcgtttcatttaaaactttggtggtttgtgttttggggccttgtaaagcccctgatgaataattgttcaactatgtttccgttcctgtgttatacctttctttctaatgagtaatgacatcaaacttcttctgtattgaaattatgtccttgtgagtctctttatcatcgtttcgtctttacattatatgtgctacttttgtctaatgagcctgaaaagtggctccaatggtacgcactggaagatttgttggcttctggtagatatagcgacagtgttgagcttgtaatatcatgtctcttattgctaaattagttcctttcttaacagaaaccttcaaagtttttgtttttgttttcatttacctaatgtacacatacgctggccatgactaacaacatgtccaggcttagagcatatttttttctagcttaaattgttaacttgtcattcagtaaaatccgagaattgtgaagctctaattgaagctaattcgttttataaagtcagttaaaaagtatactaaattatccaacttttcttcaaaatctcaaaattctatgacaaaacgatagtctttgtttatgtcagtaccacaaagaggtggaaaaaaacaccaaaaaaacaataagcaaactatacactgagaagaaaaataaaagagagcttaatagatgttttatactaacggtagattagatcaaagatccaagctatactctacatagagcagaacccagaatcccttcatatctcttttattctagcaccgataatctactgaaaagaagacacttagagctttgtctctttgtcaaagaagtcccagccgtcatccagaagctccttacgttcattaacagaggtcaccggccagaatggcccggggctagcttcgtccacagacatcaacatcttatcgtcctttgaagataagataataatgttgaagataagagtgggagccaccactaaaacattgctttgtcaaaagctaaaaaagatgatgcccgacagccacttgtgtgaagcatgagaagccggtccctccactaagaaaattagtgaagcatcttccagtggtccctccactcacagctcaatcagtgagcaacaggacgaaggaaatgacgtaagccatgacgtctaatcccacactctatcagtgatagagtttatataagactctatcagtgatagagtgaactctatcagtgatagagtagatctttcacggagcaacagtatgaaactgctgagaactgtcttgccttcctgacacaacaaggtttctcccttgagaacgccctctacgcatttcaagctgttgggatctacactctgggttgcgtcttgctggatcaagagctgcaagtcgctaaggaggagagggaaacacctactactgatagtatgccgccactggttcgacaagcttacgaactcaaagatcaccaaggtgcagagccagccttcctgttcggccttgaactgatcatatgtggattggagaagcagctgaagtgtgaaagtggatctgcagcgaggtttgtttctgcttctacctttgatatatatataataattatcattaattagtagtaatataatatttcaaatatttttttcaaaataaaagaatgtagtatatagcaattgcttttctgtagtttataagtgtgtatattttaatttataacttttctaatatatgaccaaaacatggtgatgcctaggtctgagatccactttcacacttcagctgcttctccaatccacatatgatcagttcaaggccgaacaggaaggctggctctgcaccttggtgatctttgagttcgtaagcttgtcgaaccagtggcggcatactatcagtagtaggtgtttccctctcctccttagcgacttgcagctcttgatccagcaagacgcaacccagagtgtagatcccaacagcttgaaatgcgtagagggcgttctcaagggagaaaccttgttgtgtcaggaaggcaagacagttctcagcagtttcatactgttgctccgtgaaggtaccctagacttgtccatcttctggattggccaacctaattaatgtatgaaataaaaggatgcacacatagtgacatgctaatcactataatgtgggcatcaaagttgtgtgttatgtgtaattaatagttatctgaataaaagagaaagagatcatccatatttcttatcctaaatgaatgtcacgtgtctttataattctttgatgaaccagatacatttcattaaccaaatccatatacatataaatattaatcatatataattaatatcaattcggttagcaaaacaaatctagtctaggtgtgttttgcgtctagaaaagaattcaggcctagaaggccacccagctttcttgtacaaagtggccgttaacggccagaatggcccgcagatttaggtgacactatagaatatgcatcactagtaagctttgctctagatcaaactcacatccaaacataacatggatatcttccttaccaatcatactaattattttgggttaaatattaatcattatttttaagatattaattaagaaattaaaagattttttaaaaaaatgtataaaattatattattcatgatttttcatacatttgattttgataataaatatattttttttaatttcttaaaaaatgttgcaagacacttattagacatagtcttgttctgtttacaaaagcattcatcatttaatacattaaaaaatatttaatactaacagtagaatcttcttgtgagtggtgtgggagtaggcaacctggcattgaaacgagagaaagagagtcagaaccagaagacaaataaaaagtatgcaacaaacaaatcaaaatcaaagggcaaaggctggggttggctcaattggttgctacattcaattttcaactcagtcaacggttgagattcactctgacttccccaatctaagccgcggatgcaaacggttgaatctaacccacaatccaatctcgttacttaggggcttttccgtcattaactcacccctgccacccggtttccctataaattggaactcaatgctcccctctaaactcgtatcgcttcagagttgagaccaagacacactcgttcatatatctctctgctcttctcttctcttctacctctcaaggtacttttcttctccctctaccaaatcctagattccgtggttcaatttcggatcttgcacttctggtttgctttgccttgctttttcctcaactgggtccatctaggatccatgtgaaactctactctttctttaatatctgcggaatacgcgtttgactttcagatctagtcgaaatcatttcataattgcctttctttcttttagcttatgagaaataaaatcactttttttttatttcaaaataaaccttgggccttgtgctgactgagatggggtttggtgattacagaattttagcgaattttgtaattgtacttgtttgtctgtagttttgttttgttttcttgtttctcatacattccttaggcttcaattttattcgagtataggtcacaataggaattcaaactttgagcaggggaattaatcccttccttcaaatccagtttgtttgtatatatgtttaaaaaatgaaacttttgctttaaattctattataactttttttatggctgaaatttttgcatgtgtctttgctctctgttgtaaatttactgtttaggtactaactctaggcttgttgtgcagtttttgaagtataaccatgccacacaacacaatggcggccaccgcttccagaaccacccgattctcttcttcctcttcacaccccaccttccccaaacgcattactagatccaccctccctctctctcatcaaaccctcaccaaacccaaccacgctctcaaaatcaaatgttccatctccaaaccccccacggcggcgcccttcaccaaggaagcgccgaccacggagcccttcgtgtcacggttcgcctccggcgaacctcgcaagggcgcggacatccttgtggaggcgctggagaggcagggcgtgacgacggtgttcgcgtaccccggcggtgcgtcgatggagatccaccaggcgctcacgcgctccgccgccatccgcaacgtgctcccgcgccacgagcagggcggcgtcttcgccgccgaaggctacgcgcgttcctccggcctccccggcgtctgcattgccacctccggccccggcgccaccaacctcgtgagcggcctcgccgacgctttaatggacagcgtcccagtcgtcgccatcaccggccaggtcgcccgccggatgatcggcaccgacgccttccaagaaaccccgatcgtggaggtgagcagatccatcacgaagcacaactacctcatcctcgacgtcgacgacatcccccgcgtcgtcgccgaggctttcttcgtcgccacctccggccgccccggtccggtcctcatcgacattcccaaagacgttcagcagcaactcgccgtgcctaattgggacgagcccgttaacctccccggttacctcgccaggctgcccaggccccccgccgaggcccaattggaacacattgtcagactcatcatggaggcccaaaagcccgttctctacgtcggcggtggcagtttgaattccagtgctgaattgaggcgctttgttgaactcactggtattcccgttgctagcactttaatgggtcttggaacttttcctattggtgatgaatattcccttcagatgctgggtatgcatggtactgtttatgctaactatgctgttgacaatagtgatttgttgcttgcctttggggtaaggtttgatgaccgtgttactgggaagcttgaggcttttgctagtagggctaagattgttcacattgatattgattctgccgagattgggaagaacaagcaggcgcacgtgtcggtttgcgcggatttgaagttggccttgaagggaattaatatgattttggaggagaaaggagtggagggtaagtttgatcttggaggttggagagaagagattaatgtgcagaaacacaagtttccattgggttacaagacattccaggacgcgatttctccgcagcatgctatcgaggttcttgatgagttgactaatggagatgctattgttagtactggggttgggcagcatcaaatgtgggctgcgcagttttacaagtacaagagaccgaggcagtggttgacctcagggggtcttggagccatgggttttggattgcctgcggctattggtgctgctgttgctaaccctggggctgttgtggttgacattgatggggatggtagtttcatcatgaatgttcaggagttggccactataagagtggagaatctcccagttaagatattgttgttgaacaatcagcatttgggtatggtggttcagttggaggataggttctacaagtccaatagagctcacacctatcttggagatccgtctagcgagagcgagatattcccaaacatgctcaagtttgctgatgcttgtgggataccggcagcgcgagtgacgaagaaggaagagcttagagcggcaattcagagaatgttggacacccctggcccctaccttcttgatgtcattgtgccccatcaggagcatgtgttgccgatgattcccagtaatggatccttcaaggatgtgataactgagggtgatggtagaacgaggtactgattgcctagaccaaatgttccttgatgcttgttttgtacaatatatataagataatgctgtcctagttgcaggatttggcctgtggtgagcatcatagtctgtagtagttttggtagcaagacattttattttccttttatttaacttactacatgcagtagcatctatctatctctgtagtctgatatctcctgttgtctgtattgtgccgttggattttttgctgtagtgagactgaaaatgatgtgctagtaataatatttctgttagaaatctaagtagagaatctgttgaagaagtcaaaagctaatggaatcaggttacatattcaatgtttttctttttttagcggttggtagacgtgtagattcaacttctcttggagctcacctaggcaatcagtaaaatgcatattccttttttaacttgccatttatttacttttagtggaaattgtgaccaatttgttcatgtagaacggatttggaccattgcgtccacaaaacgtctcttttgctcgatcttcacaaagcgataccgaaatccagagatagttttcaaaagtcagaaatggcaaagttataaatagtaaaacagaatagatgctgtaatcgacttcaataacaagtggcatcacgtttctagttctagacccatcagctggcctagaaggcccgggcaactttattatacaaagttgatagattgggcgcgccgaattcatttacaattgaatatatcctgcc

SEQ ID NO: 2117 - DNA, 10334 bp, Artificial Sequence
  plasmid pHD1198
aattacaacggtatatatcctgtcagccaacaccaaaacaggcgcgcctcgggatcaggatcaggatctgcggccgcatcctgcaggtcgactctagaggatcctcatcgctatcaactttgtatagaaaagttgccataggattggggccagaatggcccgggggatcctctagagaaaatcttcgtcaacatggtggagcacgacacgcttgtctactccaaaaatatcaaagatacagtctcagaagaccaaagggcaattgagacttttcaacaaagggtaatatccggaaacctcctcggattccattgcccagctatctgtcactttattgtgaagatagtggaaaaggaaggtggctcctacaaatgccatcattgcgataaaggaaaggccatcgttgaagatgcctctgccgacagtggtcccaaagatggacccccacccacgaggagcatcgtggaaaaagaagacgttccaaccacgtcttcaaagcaagtggattgatgtgatatctccactgacgtaagggatgacgcacaatcccactagactctatcagtgatagagtgtatataagactctatcagtgatagagtgaactctatcagtgatagagttgtacttatttttacaacaattaccaacaacaacaaacaacaaacaacattacaattactatttacaattacaccatggcctcctccgaggacgtcatcaaggagttcatgcgcttcaaggtgcgcatggagggctccgtgaacggccacgagttcgagatcgagggcgagggcgagggccgcccctacgagggcacccagaccgccaagctgaaggtgacaaagggcggccccctgcccttcgcctgggacatcctgtccccccagttccagtacggctccaaggtgtacgtgaagcaccccgccgacatccccgactacaagaagctgtccttccccgagggcttcaagtgggagcgcgtgatgaacttcgaggacggcggcgttgtgaccgtgacccaggactcctcccttcaggacggctccttcatctacaaggtgaagttcatcggcgtgaacttcccctccgacggccccgtaatgcagaagaagactatgggctgggaagcctccaccgagcgcctgtacccccgcgacggcgtgctgaagggcgagatccacaaggccctgaagctgaaggacggcggccactacctggtggagttcaagtctatctacatggccaagaagcccgtgcagctgcccggctactactacgtggactccaagctggacatcacctcccacaacgaggactacaccatcgtggagcagtacgagcgtgccgagggccgccaccacctgttcctgtagcgcgctgcaggtacctagatcttgttaactgagctcttttgtgatctgatgataagtggttggttcgtgtctcatgcacttgggaggtgatctatttcacctggtgtagtttgtgtttccgtcagttggaaaaacttatccctatcgatttcgttttcattttctgcttttcttttatgtaccttcgtttgggcttgtaacgggcctttgtatttcaactctcaataataatccaagtgcatgttaaacaatttgtcatctgtttcggctttgatatactactggtgaagatgggccgtactactgcatcacaacgaaaaataataataagatgaaaaacttgaagtggaaaaaaaaaaaaacttgaatgttcactactactcattgaccataatgtttaacatacatagctcaatagtatttttgtgaatatggcaacacaaacagtccaaaacaattgtctcttactataccaaaccaagggcgccgcttgtttgccactctttgtgtgcaatagtgtgattaccacatctccacattcaatatattccctgaattatctgacgattttgatggctcactgttttcccaagtcttgaattgtcttctgtgcgccagtcaaatgcatatgtgttgagtttatcttttaaatatcaagcttttgtttttaacttttgtttgtaaccaaaaactcacagtaggagtttgatcacataattttatgtttgcctttgcaatttctagtgagtctttgattaaaagcttgaaaagaaaatgcagccaagcttaccaagtaagttatgtgtattaaccagaggaagagagaatcttgcaaaatttcaacaaacacaaaaagaagtattactacgattggtggagaaagaaaacgattccaaatcttgaactgttgttgtaaaagcatagcagaaagtgggagacaaccgaaatagaaatgactataacttaatttaatgttatcattataatttcttctagcaaatatttagaaagtaaatatcacatcaacctttaatgtaattaagctttctctttttgattcatgtgagatgaaaagaaaaaaaagaagagaaaagtgtagaaaacacatcatttctaagctgaagggtcaccgaattcaggcctagaaggccatacaagtttgtacaaaaaagcaggctccataggattggggccagaatggcccgggtctagagaaaatcttcgtcaacatggtggagcacgacacgcttgtctactccaaaaatatcaaagatacagtctcagaagaccaaagggcaattgagacttttcaacaaagggtaatatccggaaacctcctcggattccattgcccagctatctgtcactttattgtgaagatagtggaaaaggaaggtggctcctacaaatgccatcattgcgataaaggaaaggccatcgttgaagatgcctctgccgacagtggtcccaaagatggacccccacccacgaggagcatcgtggaaaaagaagacgttccaaccacgtcttcaaagcaagtggattgatgtgatatctccactgacgtaagggatgacgcacaatcccactatccttcgcaagacccttcctctatataagactctatcagtgatagagtgaacacgctgaaatcaccagttgtacttatttttacaacaattaccaacaacaacaaacaacaaacaacattacaattactatttacaattacaccatggccagactcgacaagagcaaggtgatcaacagcgcactggagctgctgaacgaggtcggaatcgaaggcctcacaacccgtaagctcgcccagaagctcggggttgagcagcctacattgtactggcacgtcaagaacaagcgagctctgctagacgctatggccattgagatgttcgataggcacgccacccactactgtcctttggaaggggaaagctggcaagacttcttgaggaacaaggctaagtccatgagaaatgctttgctcagtcaccgtgatggagccaaggtcgctctaggtacgggcttcacggagcaacagtatgaaactgctgagaactgtcttgccttcctgacacaacaaggtttctcccttgagaacgccctctacgcatttcaagctgttgggatctacactctgggttgcgtcttgctggatcaagagctgcaagtcgctaaggaggagagggaaacacctactactgatagtatgccgccactggttcgacaagcttacgaactcaaagatcaccaaggtgcagagccagccttcctgttcggccttgaactgatcatatgtggattggagaagcagctgaagtgtgaaagtggatcttaatgatagctgcagaaggtacctgttaactgcgcgcgagctcaaacttatctctgttatgaatcagaagaagttcatgtctcgtttcatttaaaactttggtggtttgtgttttggggccttgtaaagcccctgatgaataattgttcaactatgtttccgttcctgtgttatacctttctttctaatgagtaatgacatcaaacttcttctgtattgaaattatgtccttgtgagtctctttatcatcgtttcgtctttacattatatgtgctacttttgtctaatgagcctgaaaagtggctccaatggtacgcactggaagatttgttggcttctggtagatatagcgacagtgttgagcttgtaatatcatgtctcttattgctaaattagttcctttcttaacagaaaccttcaaagtttttgtttttgttttcatttacctaatgtacacatacgctggccatgactaacaacatgtccaggcttagagcatatttttttctagcttaaattgttaacttgtcattcagtaaaatccgagaattgtgaagctctaattgaagctaattcgttttataaagtcagttaaaaagtatactaaattatccaacttttcttcaaaatctcaaaattctatgacaaaacgatagtctttgtttatgtcagtaccacaaagaggtggaaaaaaacaccaaaaaaacaataagcaaactatacactgagaagaaaaataaaagagagcttaatagatgttttatactaacggtagattagatcaaagatccaagctatactctacatagagcagaacccagaatcccttcatatctcttttattctagcaccgataatctactgaaaagaagacacttagagctttgtctctttgtcaaagaagtcccagccgtcatccagaagctccttacgttcattaacagaggtcaccggccagaatggcccggggctagcttcgtccacagacatcaacatcttatcgtcctttgaagataagataataatgttgaagataagagtgggagccaccactaaaacattgctttgtcaaaagctaaaaaagatgatgcccgacagccacttgtgtgaagcatgagaagccggtccctccactaagaaaattagtgaagcatcttccagtggtccctccactcacagctcaatcagtgagcaacaggacgaaggaaatgacgtaagccatgacgtctaatcccacactctatcagtgatagagtttatataagactctatcagtgatagagtgaactctatcagtgatagagtagatctgccagactcgacaagagcaaggtgatcaacagcgcactggagctgctgaacgaggtcggaatcgaaggcctcacaacccgtaagctcgcccagaagctcggggttgagcagcctacattgtactggcacgtcaagaacaagcgagctctgctagacgctatggccattgagatgttcgataggcacgccacccactactgtcctttggaaggggaaagctggcaagacttcttgaggaacaaggctaagtccatgagaaatgctttgctcagtcaccgtgatggagccaaggtcgctctaggtacgggcctgcagcgaggtttgtttctgcttctacctttgatatatatataataattatcattaattagtagtaatataatatttcaaatatttttttcaaaataaaagaatgtagtatatagcaattgcttttctgtagtttataagtgtgtatattttaatttataacttttctaatatatgaccaaaacatggtgatgcctaggtctgaggcccgtacctagagcgaccttggctccatcacggtgactgagcaaagcatttctcatggacttagccttgttcctcaagaagtcttgccagctttccccttccaaaggacagtagtgggtggcgtgcctatcgaacatctcaatggccatagcgtctagcagagctcgcttgttcttgacgtgccagtacaatgtaggctgctcaaccccgagcttctgggcgagcttacgggttgtgaggccttcgattccgacctcgttcagcagctccagtgcgctgttgatcaccttgctcttgtcgagtctggcggtaccctagacttgtccatcttctggattggccaacctaattaatgtatgaaataaaaggatgcacacatagtgacatgctaatcactataatgtgggcatcaaagttgtgtgttatgtgtaattaatagttatctgaataaaagagaaagagatcatccatatttcttatcctaaatgaatgtcacgtgtctttataattctttgatgaaccagatacatttcattaaccaaatccatatacatataaatattaatcatatataattaatatcaattcggttagcaaaacaaatctagtctaggtgtgttttgcgtctagaaaagaattcaggcctagaaggccacccagctttcttgtacaaagtggccgttaacggccagaatggcccgcagatttaggtgacactatagaatatgcatcactagtaagctttgctctagatcaaactcacatccaaacataacatggatatcttccttaccaatcatactaattattttgggttaaatattaatcattatttttaagatattaattaagaaattaaaagattttttaaaaaaatgtataaaattatattattcatgatttttcatacatttgattttgataataaatatattttttttaatttcttaaaaaatgttgcaagacacttattagacatagtcttgttctgtttacaaaagcattcatcatttaatacattaaaaaatatttaatactaacagtagaatcttcttgtgagtggtgtgggagtaggcaacctggcattgaaacgagagaaagagagtcagaaccagaagacaaataaaaagtatgcaacaaacaaatcaaaatcaaagggcaaaggctggggttggctcaattggttgctacattcaattttcaactcagtcaacggttgagattcactctgacttccccaatctaagccgcggatgcaaacggttgaatctaacccacaatccaatctcgttacttaggggcttttccgtcattaactcacccctgccacccggtttccctataaattggaactcaatgctcccctctaaactcgtatcgcttcagagttgagaccaagacacactcgttcatatatctctctgctcttctcttctcttctacctctcaaggtacttttcttctccctctaccaaatcctagattccgtggttcaatttcggatcttgcacttctggtttgctttgccttgctttttcctcaactgggtccatctaggatccatgtgaaactctactctttctttaatatctgcggaatacgcgtttgactttcagatctagtcgaaatcatttcataattgcctttctttcttttagcttatgagaaataaaatcactttttttttatttcaaaataaaccttgggccttgtgctgactgagatggggtttggtgattacagaattttagcgaattttgtaattgtacttgtttgtctgtagttttgttttgttttcttgtttctcatacattccttaggcttcaattttattcgagtataggtcacaataggaattcaaactttgagcaggggaattaatcccttccttcaaatccagtttgtttgtatatatgtttaaaaaatgaaacttttgctttaaattctattataactttttttatggctgaaatttttgcatgtgtctttgctctctgttgtaaatttactgtttaggtactaactctaggcttgttgtgcagtttttgaagtataaccatgccacacaacacaatggcggccaccgcttccagaaccacccgattctcttcttcctcttcacaccccaccttccccaaacgcattactagatccaccctccctctctctcatcaaaccctcaccaaacccaaccacgctctcaaaatcaaatgttccatctccaaaccccccacggcggcgcccttcaccaaggaagcgccgaccacggagcccttcgtgtcacggttcgcctccggcgaacctcgcaagggcgcggacatccttgtggaggcgctggagaggcagggcgtgacgacggtgttcgcgtaccccggcggtgcgtcgatggagatccaccaggcgctcacgcgctccgccgccatccgcaacgtgctcccgcgccacgagcagggcggcgtcttcgccgccgaaggctacgcgcgttcctccggcctccccggcgtctgcattgccacctccggccccggcgccaccaacctcgtgagcggcctcgccgacgctttaatggacagcgtcccagtcgtcgccatcaccggccaggtcgcccgccggatgatcggcaccgacgccttccaagaaaccccgatcgtggaggtgagcagatccatcacgaagcacaactacctcatcctcgacgtcgacgacatcccccgcgtcgtcgccgaggctttcttcgtcgccacctccggccgccccggtccggtcctcatcgacattcccaaagacgttcagcagcaactcgccgtgcctaattgggacgagcccgttaacctccccggttacctcgccaggctgcccaggccccccgccgaggcccaattggaacacattgtcagactcatcatggaggcccaaaagcccgttctctacgtcggcggtggcagtttgaattccagtgctgaattgaggcgctttgttgaactcactggtattcccgttgctagcactttaatgggtcttggaacttttcctattggtgatgaatattcccttcagatgctgggtatgcatggtactgtttatgctaactatgctgttgacaatagtgatttgttgcttgcctttggggtaaggtttgatgaccgtgttactgggaagcttgaggcttttgctagtagggctaagattgttcacattgatattgattctgccgagattgggaagaacaagcaggcgcacgtgtcggtttgcgcggatttgaagttggccttgaagggaattaatatgattttggaggagaaaggagtggagggtaagtttgatcttggaggttggagagaagagattaatgtgcagaaacacaagtttccattgggttacaagacattccaggacgcgatttctccgcagcatgctatcgaggttcttgatgagttgactaatggagatgctattgttagtactggggttgggcagcatcaaatgtgggctgcgcagttttacaagtacaagagaccgaggcagtggttgacctcagggggtcttggagccatgggttttggattgcctgcggctattggtgctgctgttgctaaccctggggctgttgtggttgacattgatggggatggtagtttcatcatgaatgttcaggagttggccactataagagtggagaatctcccagttaagatattgttgttgaacaatcagcatttgggtatggtggttcagttggaggataggttctacaagtccaatagagctcacacctatcttggagatccgtctagcgagagcgagatattcccaaacatgctcaagtttgctgatgcttgtgggataccggcagcgcgagtgacgaagaaggaagagcttagagcggcaattcagagaatgttggacacccctggcccctaccttcttgatgtcattgtgccccatcaggagcatgtgttgccgatgattcccagtaatggatccttcaaggatgtgataactgagggtgatggtagaacgaggtactgattgcctagaccaaatgttccttgatgcttgttttgtacaatatatataagataatgctgtcctagttgcaggatttggcctgtggtgagcatcatagtctgtagtagttttggtagcaagacattttattttccttttatttaacttactacatgcagtagcatctatctatctctgtagtctgatatctcctgttgtctgtattgtgccgttggattttttgctgtagtgagactgaaaatgatgtgctagtaataatatttctgttagaaatctaagtagagaatctgttgaagaagtcaaaagctaatggaatcaggttacatattcaatgtttttctttttttagcggttggtagacgtgtagattcaacttctcttggagctcacctaggcaatcagtaaaatgcatattccttttttaacttgccatttatttacttttagtggaaattgtgaccaatttgttcatgtagaacggatttggaccattgcgtccacaaaacgtctcttttgctcgatcttcacaaagcgataccgaaatccagagatagttttcaaaagtcagaaatggcaaagttataaatagtaaaacagaatagatgctgtaatcgacttcaataacaagtggcatcacgtttctagttctagacccatcagctggcctagaaggcccgggcaactttattatacaaagttgatagattgggcgcgccgaattcatttacaattgaatatatcctgcc

SEQ ID NO: 2118 - DNA, 10330 bp, Artificial Sequence; identical to SEQ ID NO: 2116
  plasmid pHD1199

1. A recombinant polynucleotide construct comprising:
(a) a polynucleotide of interest operably linked to a first repressible promoter active in a plant, wherein said first repressible promoter comprises at least one operator;
(b) a polynucleotide encoding a chemically-regulated transcriptional repressor operably linked to a promoter active in said plant; and
(c) a gene silencing construct operably linked to a second repressible promoter, wherein said gene silencing construct encodes a silencing element that decreases said chemically-regulated transcriptional repressor, wherein said second repressible promoter comprises at least one operator, and wherein said chemically-regulated transcriptional repressor can bind to each of said operators in the absence of a chemical ligand and thereby repress transcription from said first and said second repressible promoters in the absence of said chemical ligand.

2. The recombinant polynucleotide construct of claim 1, wherein
(i) said first repressible promoter operably linked to said polynucleotide of interest comprises three of said operators; and/or
(ii) said promoter operably linked to said polynucleotide encoding said chemically-regulated transcriptional repressor comprises a third repressible promoter, wherein said third repressible promoter comprises at least one operator; and/or
(iii) said second repressible promoter operably linked to said gene silencing construct comprises three of said operators.

3-4. (canceled)

5. The recombinant polynucleotide construct of claim 1, wherein said polynucleotide encoding said chemically-regulated transcriptional repressor is regulated by a sulfonylurea compound.

6. (canceled)

7. The recombinant polynucleotide construct of claim 1, wherein said polynucleotide encoding said chemically-regulated transcriptional repressor is regulated by tetracycline.

8. The recombinant polynucleotide construct of claim 1, wherein said gene silencing construct encodes a cell non-autonomous silencing element that decreases said chemically-regulated transcriptional repressor.

9. The recombinant polynucleotide construct of claim 1, wherein said silencing element comprises a siRNA, a trans-acting siRNA (TAS), a hairpin RNA or an miRNA.

10-11. (canceled)

12. A plant cell comprising
(a) a first polynucleotide construct comprising a polynucleotide of interest operably linked to a first repressible promoter active in said plant cell, wherein said first repressible promoter comprises at least one operator;
(b) a second polynucleotide construct comprising a polynucleotide encoding a chemically-regulated transcriptional repressor operably linked to a promoter active in said plant cell; and,
(c) a third polynucleotide construct comprising a gene silencing construct operably linked to a second repressible promoter comprising at least one operator,
wherein (i) said gene silencing construct encodes a cell non-autonomous silencing element that decreases the level of said chemically-regulated transcriptional repressor, (ii) said second repressible promoter comprises at least one operator regulating expression of the gene silencing construct, (iii) said chemically-regulated transcriptional repressor can bind to each of said operators in the absence of a chemical ligand and thereby repress transcription of said first and said second repressible promoters in the absence of said chemical ligand, and (iv) said plant cell is tolerant to the chemical ligand.

13. The plant cell of claim 12, wherein said first, second, and third polynucleotide constructs are contained on the same recombinant polynucleotide.

14. The plant cell of claim 12, wherein
(i) said first repressible promoter operably linked to said polynucleotide of interest comprises three of said operators; and/or
(ii) said promoter operably linked to said polynucleotide encoding said chemically-regulated transcriptional repressor comprises a third repressible promoter, wherein said third repressible promoter comprises at least one operator regulating expression of said repressor; and/or
(iii) said second repressible promoter operably linked to said gene silencing construct comprises three of said operators.

15-16. (canceled)

17. The plant cell of claim 12, wherein said chemically-regulated transcriptional repressor has a chemical ligand comprising a sulfonylurea compound.

18. (canceled)

19. The plant cell of claim 12, wherein said chemically-regulated transcriptional repressor has a chemical ligand comprising tetracycline.

20. The plant cell of claim 12, wherein said gene silencing construct encodes a cell non-autonomous silencing element that decreases said chemically-regulated transcriptional repressor.

21. The plant cell of claim 12, wherein said silencing element comprises a siRNA, a trans-acting siRNA (TAS), a hairpin RNA or an amiRNA.

22-23. (canceled)

24. A plant comprising the plant cell of claim 12.

25-26. (canceled)

27. The plant of claim 24, wherein providing the plant with an effective amount of the chemical ligand (i) increases expression of said polynucleotide of interest and said silencing construct and (ii) decreases the level of said chemically-regulated transcriptional repressor in said plant or a part thereof.

28. The plant of claim 27, wherein providing an effective amount of said chemical ligand to said plant results in spatially or temporally extended expression of said polynucleotide of interest in said plant as compared to expression in a plant having been contacted with said effective amount of said chemical ligand and lacking said gene silencing construct.

29-30. (canceled)

31. The plant of claim 27, wherein providing said chemical ligand results in the complete penetration of expression of the polynucleotide of interest in the shoot apical meristem of said plant.

32. The plant of claim 27, wherein providing said chemical ligand results in the complete penetration of expression of said polynucleotide of interest throughout the plant.

33. A transformed seed of the plant of claim 24, wherein said seed comprises said first, second, and third polynucleotide construct.

34. The transformed seed of claim 33, wherein said first, second, and third polynucleotide constructs are contained on the same recombinant polynucleotide.

35. A method to regulate expression in a plant, comprising
(a) providing a plant comprising (i) a first polynucleotide construct comprising a polynucleotide encoding a chemically-regulated transcriptional repressor operably linked to a promoter active in said plant, (ii) a second polynucleotide construct comprising a polynucleotide of interest operably linked to a first repressible promoter, and (iii) a third polynucleotide construct comprising a gene silencing construct operably linked to a second repressible promoter,
wherein said gene silencing construct encodes a silencing element that decreases the level said chemically-regulated transcriptional repressor, wherein said first and second repressible promoters each comprise at least one operator, wherein said chemically-regulated transcriptional repressor can bind to each of said operators in the absence of a chemical ligand and thereby repress transcription from said first and said second repressible promoters in the absence of said chemical ligand, and wherein said plant is tolerant to said chemical ligand; and
(b) providing the plant with an effective amount of the chemical ligand whereby (i) expression of said polynucleotide of interest and said silencing construct are increased and (ii) the level of said chemically-regulated transcriptional repressor is decreased.

36-55. (canceled)
